United States Patent Application Publication US 2026/0271966 A1, published September 17, 2026 (application 19/167,017).

The application's sequence listing, which the Patent Office published only in electronic form, follows.

SEQUENCE LISTING (57 sequences)

SEQ ID NO: 1 - DNA, 1000000 bp, Bacillus subtilis
  source 1..1000000: mol_type = genomic DNA; strain = Strain 105 ELA191105 ATCC PTA 126786
atggaaaatatattagacctgtggaaccaagcccttgctcaaatcgaaaaaaagttgagcaaaccgagttttgagacttggatgaagtcaaccaaagcccactcactgcaaggcgatacattaacaatcacggctcccaatgaatttgccagagactggctggagtccagatacttgcatctgattgcagatactatatatgaattaaccggggaagaattgagcattaagtttgtcattcctcaaaatcaagatgttgaggactttatgccgaaaccgcaagtcaaaaaagcggtcaaagaagatacatctgattttcctcaaaatatgctcaatccaaaatatacttttgatacttttgtcatcggatctggaaaccgatttgcacacgctgcttccctcgcagtagcggaagcacccgcgaaagcttacaaccctttatttatctatgggggcgtcggcttagggaaaacgcacttaatgcatgcgatcggccattatgtaatagatcataatccttctgccaaagtggtttatctgtcttctgagaaatttacaaacgaattcatcaactctatccgagataataaagccgtcgacttccgcaatcgctatcgaaatgttgatgtgcttttgatagatgatattcaatttttagcggggaaagaacaaacccaggaagaatttttccatacatttaacacattgcacgaagaaagcaaacaaatcgtcatttcaagtgatcgaccgccaaaggaaattccgacacttgaggacagattgcgctcacgttttgaatggggacttattacagatatcacaccgcctgatctagaaacgagaattgcgattttaagaaaaaaagccaaagcagaaggcctcgatattccgaacgaggttatgctttacatcgcgaatcaaatcgacagcaatattcgggaactcgaaggagcattaatcagagttgtcgcttattcatctttaattaataaagatattaatgctgatctggccgctgaggcgttgaaagatattattccttcctcaaaaccgaaagtcattacgataaaagaaattcagagggtagtaggccagcaatttaatattaaactcgaggatttcaaagcaaaaaaacggacaaagtcagtagcttttccgcgtcaaatcgccatgtacttatcaagggaaatgactgattcctctcttcctaaaatcggtgaagagtttggaggacgtgatcatacgaccgttattcatgcgcatgaaaaaatttcaaaactgctggcagatgatgaacagcttcagcagcatgtaaaagaaattaaagaacagcttaaatagcaggaccggggatcaatcggggaaagtgtgaataacttttcggaagtcatacacagtctgtccacatgtggataggctgtgtttcctgtctttttcacaacttatccacaaatccacaggccctactattacttctactattttttataaatatatatattaatacattatccgttaggaggataaaaatgaaattcacgattcaaaaagatcgtcttgttgaaagtgtccaagatgtattaaaagcagtttcatccagaaccacgattcccattctgactggtattaaaattgttgcatcagatgatggagtatcctttacagggagtgactcagatatttctattgaatccttcattccaaaagaagaaggagataaagaaattgtcactattgaacagcccggaagcatcgttttacaggctcgcttttttagtgaaattgtaaaaaaattgccgatggcaactgtagaaatcgaagtccaaaatcagtatttgacgattatccgttctggtaaagctgaatttaatctaaacggactggatgctgatgagtatccgcacttgcctcagattgaagagcatcatgcgattcagatcccaactgatttgttaaaaaatctaatcagacaaacagtatttgcagtgtccacctcagaaacacgccctatcttgacaggtgtaaactggaaagtggagcaaagtgaattattatgcactgcaacggatagccaccgtcttgcattaagaaaggcaaaacttgatattccagaagacagatcttataacgtcgtgattccgggaaaaagtttaactgaactcagcaagattttagatgacaaccaagaacttgtagatatcgtcatcacagaaacccaagttctgtttaaagcgaaaaacgtcttattcttctcacggcttctggacgggaattatccagacacaaccagcctgattccgcaagacagcaaaacagaaatcattgtgaacacaaaagaattccttcaggccattgatcgtgcatctcttttagctagagagggacgcaacaacgttgtaaaactgtccgcaaaaccggctgaatccattgaaatttcttccaactccccggaaatcggtaaagttgtggaagcaattgctgcggatcaaattgaaggtgaggaattaaatatctcttttagtccaaaatatatgctggatgcactaaaggtgcttgaaggagcagaaatacgcgtaagctttacaggcgcaatgagacctttcttaattcgcacgccgaatgatgaaacgattgtacagcttatcctccctgtcagaacctattaatccgatacactgctgccgacccgtcggcagcttttctattcggtatctgctccgacaagttttccctttccctaattcgtttttttttagtacaattagatattagtgatatttgaaagaggtcgatataatggcaaatccgatttcaattgatacagagatgattacactcggacaattcttaaaattagccgatgtgattcagtctggcggtatggcgaagtggtttttaagcgagcatgaagtgcttgtgaacgatgagccggacaaccgccggggcagaaaactgtatgttggagatgtggtagagattgaaggatttggttcatttcaagtcgtcaattaaagcgggtgacactgattgtatatccagaacttagaactgacatcttaccgcaactacgaccatgctgaacttcaatttgaaaataaagtaaatgtgatcatcggagaaaacgcccaggggaagacaaacctcatggaggcgatctatgtcttgtccatggcgaaatcgcaccggacatcaaatgacaaagaacttatacggtgggacaaagactatgctaaaatagagggaagagtgatgaagcaaaacggggcgatcccgatgcagctcgtcatctccaaaaagggtaaaaagggcaaggtcaatcatattgaacagcaaaagctcagccagtatgtcggagccctcaacaccattatgttcgcgccggaagatttaaatcttgtaaagggaagccctcaagtgagaaggcggtttcttgacatggaaatcggacaggtttctctcgtctaccttcatgatctttctctttaccagaaaatcctttcccagcggaatcattttttgaaacagctgcaaacaagaaaacaaactgaccggacgatgctcgatgttctgaccgatcagcttgtagaagttgcagcaaaagtcgtcgtaaaacgcctgcagtttacagcacagctcgagaaatgggcgcagcccatccatgcaggcatctcaagagggcttgaagaactgaccctgaaataccatacagctcttgaggtatcagatcccctagatttgtcgaaaataggagatagctatcaagaagcgttttctaaattaagagaaaaagaaattgagcgtggtgtgacgctgtcagggcctcatcgcgatgatgttcttttctatgtgaacggacgcgatgtgcagacgtatggttctcaaggacagcagcgaacgacggcgttgtcccttaagctggcggagattgacctgatccatgaagaaatcggagaatatcccattttactattggatgatgtactgagtgaactggatgattatcgccagtcacacttgcttcatacgatccaaggccgtgtacaaacgtttgtcacaacgacaagcgttgatggcattgatcacgaaaccttacgtcaagcaggaatgttccgtgtgcaaaatggtgcgttagtgaagtgaagaaatgaggtgagcaattgtatattcatttaggtgatgactttgtggtttcaacacgagatattgtcggcatttttgactttaaagccaacatgtcgcctattgttgaagaatttctgaaaaaacagaaacacaaggtggtgcctttcgtaaacggcacgcccaaatctatcgtagtcacggttcagaatatatattactctcccttatcttccagcacattaaaaaaacgtgcgcaatttatgtttgaaatagattcttagaaattttttatcacgaatatatcgtttagaaaagtgtaggtgaatgacgtggctatggaacagcagcaaaacagttatgatgaaaatcagatacaggtactagaaggattggaagctgttcgtaaaagaccggggatgtatatcggttcgacaaacagcaaaggccttcaccacctggtatgggaaattgtcgacaatagtattgacgaagccctcgccggttattgtacggatatcaatatccaaatcgaaaaagacaacagtatcacggttgtagataatggccgcggtattccagtcggtattcatgaaaaaatgggccgtcctgcggtagaagtcattatgacggtacttcatgccggaggaaaatttgacggaagcggctataaagtatccggaggattacacggtgtaggtgcgtctgtcgtaaacgcactatcaacagagcttgatgtgacggttcaccgtgacggtaaaattcaccgccaaacttataaacgcggagttccggttacagaccttgaaatcattggcgaaacggatcatacaggaacgacgacacattttgtcccggaccctgaaattttctcagaaacaaccgagtatgattatgatctgcttgccaaccgcgtacgtgaattagcctttttaacaaagggcgtaaacatcacgattgaggataaacgtgaaggacaagagcgcaaaaatgaataccattacgaaggcggaattaaaagttatgtagagtatttaaaccgctctaaagaggttgtccatgaagagccgatttacattgaaggcgaaaaggacggcattacggttgaagtggctttgcaatacaatgacagctacacaagcaacatttactcgtttacaaacaacattaacacgtacgaaggcggtacccatgaagctggcttcaaaacgggcctgactcgtgttatcaacgattacgccagaaaaaaagggcttattaaagaaaatgatccaaacctaagcggagatgacgtaagggaagggctgacagcgattatttcaatcaaacaccctgatccgcagtttgagggccaaacgaaaacaaagctgggcaactcagaagcacggacgatcaccgatacgttattttctacggcgatggaaacatttatgctggaaaatccagatgcagccaaaaaaattgtcgataaaggcttaatggcggcaagagcaagaatggctgcgaaaaaagcccgtgaactaacacgtcgtaagagtgctttggaaatttcaaacctgcccggtaagttagcggactgctcttcaaaagatccgagcatctccgagttatatatcgtagagggtgactctgccggaggatctgctaaacaaggacgcgacagacatttccaagccattttgccgcttagaggtaaaatcctaaacgttgaaaaggccagactggataaaatcctttctaacaacgaagttcgctctatgatcacagcgctcggcacaggtattggggaagacttcaaccttgagaaagcccgttaccacaaagttgtcattatgacagatgccgatgttgacggcgcgcacatcagaacactgctgttaacgttcttttacagatatatgcgccaaattatcgaaaatggctacgtgtacattgcgcagccgccgctctacaaggttcaacaggggaaacgcgttgaatatgcgtacaatgacaaggagctggaagagctgttaaaaactcttcctcaaacgcctaagcctggactgcagcgttacaaaggtcttggtgaaatgaatgccacccagctatgggagacaaccatggatcctagttccagaacacttcttcaggtaactcttgaagatgcaatggatgcggacgagacttttgaaatgcttatgggcgacaaggtagaaccgcgccgaaacttcatagaagcgaatgcgagatacgttaaaaatcttgacatctaatcataaaaagccttatttccaataagaaataaggcttttttctgaacaagatcagatgcagcaatgcttgcagtacctatatattctagcaatttaatgtgtataatcataagtttattgatataatggagaatagtgaaatcgtattgaaggtcataatggacaatctactcccacatatttcatgtgatacttcagggaggttttttaatgagtgaacaaaacacaccacaagttcgtgaaataaatatcagtcaggaaatgcgtacgtccttcttggattatgcaatgagcgttatcgtgtcccgtgctcttccagatgttcgagacggtttaaaaccggttcatagacggattttgtatgcaatgaatgatttaggcatgacaagtgacaagccttataaaaaatccgcgcgtatcgttggagaagttatcgggaaataccacccgcacggtgattcagcggtatatgaatccatggtcagaatggctcaggatttcaactaccgttatatgctcgttgacggtcacggaaacttcggttctgttgacggagactcagcggcggccatgcgttatacagaagcaagaatgtctaaaatctcaatggagattcttcgcgacatcacaaaagacacaatcgattaccaggataactatgacgggtcagaaagagaacctgtcgttatgccttcaaggttcccgaatctgctcgtgaacggtgctgccggcattgcggtaggtatggcaacaaacattcctccgcaccagctgggagaaatcattgacggtgtacttgctgtcagtgagaatccggacattacaattccagagcttatggaagtcattccagggcctgatttcccgaccgcgggtcaaatcttgggacgcagcggtatccggaaagcatacgaatcaggccgaggctctatcacgatccgggcaaaagctgagatcgaacaaacatcttcgggtaaagaaagaattatcgttacagagttaccttaccaagtaaataaggctaaattaattgagaaaattgcagatctcgtaagggacaaaaagatagagggtatcacagatctgcgtgatgagtcagatcgtacaggtatgagaattgtcattgaaatcagacgcgacgccaatgcaaatgtcatcttaaacaatctgtacaaacaaactgctctacaaacatcttttggcatcaacctgcttgcacttgttgatggccagccgaaagttttaactcttaagcaatgcctggagcattacctcgaccatcaaaaagttgtcattagacgccgtactgcttatgaattgcgtaaagcggaagcgagagctcatatcctggaaggattgagagttgcactggatcatctcgatgcagttatctcccttatccgtaattctcaaacggctgaaattgcgagaacaggtttaattgaacaattctcactgacagagaagcaagcacaagcgatccttgatatgaggctccagcgtttaacgggactggaacgtgaaaagatagaagaagaataccaatctcttgttaaattaattgcagagctaaaagacatcttggcaaatgaatataaagtgcttgagatcattcgtgaagaactcacggaaatcaaagagcgttttaacgatgaaagacgtactgagatcgtcacttctggactggagactattgaagatgaagatctcatcgagagagaaaatatcgtagttactctgacgcacaacggatacgtcaaacgtcttcctgcatcaacttaccgcagtcaaaaacgaggcggaaaaggtgtacaaggtatgggaacaaacgaagatgatttcgttgagcatttgatctctacgtcaactcatgacacgattctcttcttctcgaacaaggggaaagtgtatcgtgcaaaagggtatgaaatccctgaatacggcagaacggcaaaaggaatcccgattattaacctgctggaggtagaaaagggtgagtggatcaacgcgattattccagtcacggaattcaatgcggagctttaccttttcttcactacaaagcatggggtttcaaaacgaacatcgctatctcaattcgctaatatccgcaacaatggtctaatcgctctgggtcttcgtgaagatgatgaactgatgggtgtacgtctgactgacggcacaaaacaaatcatcattggaacgaaaaacggtttactgatccgtttccctgaaacagatgtccgggagatgggaagaactgcggcgggcgtaaaaggcatcaccctgacggatgacgacgttgttgtcggcatggagatattagaggaagaatcacacgtccttatcgtaactgaaaaagggtacggaaaacgaactccggctgaagagtacagaacccaaagccggggcggaaaaggactcaaaacagcgaaaatcaccgagaacaacggccaactagtagcagtgaaagctactaaaggtgaagaggatctaatgattattacagctagcggcgtactcatcagaatggacatcaatgatatctccatcaccggacgtgtcactcaaggtgtgcgtctcatcagaatggcagaagaagagcatgttgctacagtagctttagtagagaaaaacgaagaagatgagaatgaagaagaacaagaagaagtgtgagaaaaagcgcagctgaaatagctgcgcttttttgtgtcataaccctttacagtcataaaaattatggtataatcatttttgttgtctttttaaagacacaagcatgaccattatgactagtaaaaacttttttaaaaaagtattgacctagttaactaaaaatgttactattaagtagtcgcttcgagagaagcacacaaagttctttgaaaactaaacaagacaaaacgtacctgttaattcatttttaaaaatcgcacagcgatgtgcgtagtcagtcaaactagggcctgcacgacgcaggtcacacaggtgtcgccgcaggatgcggtgaacttaacctgtgatccatttatcggagagtttgatcctggctcaggacgaacgctggcggcgtgcctaatacatgcaagtcgagcggacagatgggagcttgctccctgatgttagcggcggacgggtgagtaacacgtgggtaacctgcctgtaagactgggataactccgggaaaccggggctaataccggatggttgtttgaaccgcatggttcaaacataaaaggtggcttcggctaccacttacagatggacccgcggcgcattagctagttggtgaggtaacggctcaccaaggcaacgatgcgtagccgacctgagagggtgatcggccacactgggactgaggcacggcccagactcctacgggaggcagcagtagggaatcttccgcaatggacgaaagtctgacggagcaacgccgcgtgagtgatgaaggttttcggatcgtaaagctctgttgttagggaagaacaagtaccgttcgaatagggcggtaccttgacggtacctaaccagaaagccacggctaactacgtgccagcagccgcggtaatacgtaggtggcaagcgttgtccggaattattgggcgtaaagggctcgcaggcggtttcttaagtctgatgtgaaagcccccggctcaaccggggagggtcattggaaactggggaacttgagtgcagaagaggagagtggaattccacgtgtagcggtgaaatgcgtagagatgtggaggaacaccagtggcgaaggcgactctctggtctgtaactgacgctgaggagcgaaagcgtggggagcgaacaggattagataccctggtagtccacgccgtaaacgatgagtgctaagtgttagggggtttccgccccttagtgctgcagctaacgcattaagcactccgcctggggagtacggtcgcaagactgaaactcaaaggaattgacgggggcccgcacaagcggtggagcatgtggtttaattcgaagcaacgcgaagaaccttaccaggtcttgacatcctctgacaatcctagagataggacgtccccttcgggggcagagtgacaggtggtgcatggttgtcgtcagctcgtgtcgtgagatgttgggttaagtcccgcaacgagcgcaacccttgatcttagttgccagcattcagttgggcactctaaggtgactgccggtgacaaaccggaggaaggtggggatgacgtcaaatcatcatgccccttatgacctgggctacacacgtgctacaatggacagaacaaagggcagcgaaaccgcgaggttaagccaatcccacaaatctgttctcagttcggatcgcagtctgcaactcgactgcgtgaagctggaatcgctagtaatcgcggatcagcatgccgcggtgaatacgttcccgggccttgtacacaccgcccgtcacaccacgagagtttgtaacacccgaagtcggtgaggtaaccttttaggagccagccgccgaaggtgggacagatgattggggtgaagtcgtaacaaggtagccgtatcggaaggtgcggctggatcacctcctttctaaggatattatacggaatataagaccttgggtcttataaacagaacgttccctgtcttgtttagttttgaaggaactttgttccttgaataagttaagatgggcctgtagctcagctggttagagcgcacgcctgataagcgtgaggtcggtggttcgagtccactcaggcccaccatcttatataacggggccttagctcagctgggagagcgcctgctttgcacgcaggaggtcagcggttcgatcccgctaggctccaccaacgtgttctttgaaaactagataacagtagacatcacattcaattagtaatacaagatatcacatagtgattctttttaacggttaagttagaaagggcgcacggtggatgccttggcactaggagccgatgaaggacgggacgaacaccgatatgcttcggggagctgtaagcaagctttgatccggagatttccgaatggggaaacccaccactcgtaatggagtggtatccatatctgaattcataggatatgagaaggcagacccggggaactgaaacatctaagtacccggaggaagagaaagcaaatgcgattccctgagtagcggcgagcgaaacgggattagcccaaaccaagaggcttgcctcttggggttgtaggacactctgtacggagttacaaaggaacgaggtagatgaagaggtctggaaaggcccgccataggaggtaacagccctgtagtcaaaacttcgttctctcctgagtggatcctgagtacggcggaacacgtgaaattccgtcggaatccgggaggaccatctcccaaggctaaatactccctagtgaccgatagtgaaccagtaccgtgagggaaaggtgaaaagcaccccggaaggggagtgaaagagatcctgaaaccgtgtgcctacaagtagtcagagcccgttaacgggtgatggcgtgccttttgtagaatgaaccggcgagttacgatcccgtgcaaggttaagcagaagatgcggagccgcagcgaaagcgagtctgaatagggcgcatgagtacgtggtcgtagacccgaaaccaggtgatctacccatgtccagggtgaagttcaggtaacactgaatggaggcccgaacccacgcacgttgaaaagtgcggggatgaggtgtgggtaggggtgaaatgccaatcgaacctggagatagctggttctctccgaaatagctttagggctagcctcaaggtaagagtcttggaggtagagcactgattggactaggggcccctaccgggttaccgaattcagtcaaactccgaatgccaatgacttatccttgggagtcagactgcgagtgataagatccgtagtcgaaagggaaacagcccagaccgccagctaaggtcccaaagtatacgttaagtggaaaaggatgtggagttgcttagacaaccaggatgttggcttagaagcagccaccatttaaagagtgcgtaatagctcactggtcgagtgactctgcgccgaaaatgtaccggggctaaacgtatcaccgaagctgcggactgttcttcgaacagtggtaggagagcgttctaagggctgtgaagccagaccggaaggactggtggagcgcttagaagtgagaatgccggtatgagtagcgaaagaggggtgagaatcccctccaccgaatgcctaaggtttcctgaggaaggctcgtccgctcagggttagtcgggacctaagccgaggccgaaaggcgtaggcgatggacaacaggttgatattcctgtaccacctcctcaccatttgagcaatggggggacgcaggaggatagggtaagcgcggtattggatatccgcgtccaagcagttaggctgggaaataggcaaatccgtttcccataaggctgagctgtgatggcgagcgaaatatagtagcgaagttcctgattccacactgccaagaaaagcctctagcgaggtgagaggtgcccgtaccgcaaaccgacacaggtaggcgaggagagaatcctaaggtgatcgagagaactctcgttaaggaactcggcaaaatgaccccgtaacttcgggagaaggggtgctctgttagggtgcaagcccgagagagccgcagtgaataggcccaggcgactgtttagcaaaaacacaggtctctgcgaagccgtaaggcgaagtataggggctgacgcctgcccggtgctggaaggttaagaggagcgcttagcgtaagcgaaggtgcgaattgaagccccagtaaacggcggccgtaactataacggtcctaaggtagcgaaattccttgtcgggtaagttccgacccgcacgaaaggcgcaacgatctgggcactgtctcaacgagagactcggtgaaattatagtacctgtgaagatgcaggttacccgcgacaggacggaaagaccccgtggagctttactgcagcctgatattgaatgttggtacagcttgtacaggataggtaggagccttggaaaccggagcgccagcttcggtggaggcatcggtgggatactaccctggctgtattgaccttctaacccgccgcccttatcgggcggggagacagtgtcaggtgggcagtttgactggggcggtcgcctcctaaaaggtaacggaggcgcccaaaggttccctcagaatggttggaaatcattcgcagagtgtaaaggcacaagggagcttgactgcgagacctacaagtcgagcagggacgaaagtcgggcttagtgatccggtggttccgcatggaagggccatcgctcaacggataaaagctaccccggggataacaggcttatctcccccaagagtccacatcgacggggaggtttggcacctcgatgtcggctcatcgcatcctggggctgtagtcggtcccaagggttgggctgttcgcccattaaagcggtacgcgagctgggttcagaacgtcgtgagacagttcggtccctatccgtcgcgggcgcaggaaatttgagaggagctgtccttagtacgagaggaccgggatggacgcaccgctggtgtaccagttgttctgccaagggcatcgctgggtagctatgtgcggacgggataagtgctgaaagcatctaagcatgaagcccccctcaagatgagatttcccattccgcaaggaagtaagatccctgaaagatgatcaggttgataggtctgaggtggaagtgtggcgacacatggagctgacagatactaatcgatcgaggacttaaccatatttttgaatgatgtcacacctgttatctagttttgagagaacactctcaatttgtttggtggcgatagcgaagaggtcacacccgttcccataccgaacacggaagttaagctcttcagcgccgatggtagtcgggggtttccccctgtgagagtaggacgccgccaagcaagcttaaacccagctcattgagctgggttttttgtttgttaaaaatgaagaagaaactgtgaagcgtatttagggaatttattttctgatactaataaaaactgctgaattaacacgtagtcatcacttatatgctgtgttaataactcataccaccattctgtttcataccttgcaatcatcccaacgttgtacaaaatcaaataatgaattgtcatttcgggaagcctcagaaattgctccctttgagaagggatataatattggttcttttccatgtcaaacaataagctggtcgatgtccatggctccttgtcttgtggtgaaatttcgaacagcagcccgtgttcatttttttttgtaaaagaccattgataatgatgggacatgtattcagcaaaccttgaatcagacattttgtaattgattactacttcctccggtataaaaatttcgttcttatccttctcaacttttgtcataaatcgttctttctgctgaaagtagaaaatatcgctaagttctggaatggccattaataattttttcatggtataccgttcatctactatatccgattgtccaaataaatgtttcataaaatgtacgcataggccattccgttgtattttcacttcatcgtcgctaaaacaataattttgtttctttcgttttcttgttgttacgccatgtgccagtactgatgtatggcttggataatgaggatcacgtgtaattaagcatgctttgataagctgtgccattccataaaataaaagaatcggtttgatttctaagggagaatatgcagcttgtttataaaacgattcggcatgctttaagaaataaataaaccgttcactgtttttaaaagagttttttttcgcatcgtcaataccgtttaagatataaaccttttctagaaatttctgggttgattcaacggagtaaaatagcgctaagtctttccactcatgatatgtcatgtatatttcttaatcctttccgttatctaaatatttcaactctttcccgcttccttgacatgctcttggctagttgataatctacatataatattttgccgaaaagagggggatttactaatgtgggaaagtaaattttcaaaagaaggcttaacgttcgacgatgtgctgcttgtaccagcaaagtctgaggtacttccgcgtgatgtggatttatctgtagaacttacaaaaacgttaaagctaaatattcctgtcatcagcgcaggtatggacactgtaacagaatcagcaatggcaattgcaatggcaagacagggcggcttgggcatcattcacaaaaatatgtccattgaacagcaggctgaacaagttgataaagtaaagcgttctgagcgcggcgttatcacaaatcccttctttttaactcctgatcaccaagtatttgatgcggagcatttgatggggaaatacagaatttccggtgttccgattgtaaataacgaagaagaccagaagcttgttggaattattacaaaccgtgaccttcgttttatttctgactactcaatgaaaatcagcgacgtcatgacgaaagaagagctagttactgcatctgtaggaactactctggatgaagctgaaaagattttgcagaaacataaaattgaaaagcttcctctcgtagatgaccagaataaattaaaaggtcttatcacaattaaagacattgaaaaagtcattgagttcccgaactcatctaaagacattcacggccgcctgatcgttggcgcggcagttggtgtaactggcgatacaatgactcgcgtcaaaaagcttgttgaagccaatgttgatgtgattgttatcgatacagctcacggacactctcaaggcgttttaaacacagtcacaaaaattcgtgaaacgtatcccgaattaaacattattgctggaaacgtggcaacagctgaagcgacaagagcgcttatcgaagctggagcagacgttgtcaaagttggaataggacctggttcaatttgtactacacgtgttgtagccggcgtcggtgttccgcaaattacagcaatttatgattgtgcgactgaagcaagaaaacacggcaaaacaatcatagccgatggtgggattaaattctctggcgatatcactaaagcgttggcagccggcggacatgctgttatgctcggaagcttgcttgcaggcacatctgaaagccctggtgaaactgaaatctatcaaggcagaagatttaaggtataccgcggcatgggatcagttgctgcaatggaaaaaggaagtaaagaccgttacttccaagaagaaaacaaaaaatttgttcctgaaggaattgaaggacgcacaccttacaaagggccagttgaagaaaccgtttatcagctagtcggaggccttcgttctggtatggggtattgcgggtccaaagatctgcgtgcgctaagagaagaagctcagttcattcgcatgactggcgcaggacttcgcgaaagccatccgcatgacgtacagattacaaaagaatcacctaactatacaatttcataataaattgttacaaattaaaaacatttgacagggtctctgactctgtctattttttttatactgattatgataaaatttatactgttgtgcattgaaaatgtccttaacggcttaattatagatgaagaaaatgaaatacggaggtcgtacgattgaacatcaagaaatgtaaacagctactgatgtcattggttgtgttaactctagctgtcacgtgtctggctccaatgtcaaaagcaaaagcagccagcgatccaattgatatcaatgcatctgctgctattatgatcgaagcttcttcaggtaaaattctttacagtaaaaatgcagataagagactgccaattgcgagtatgacaaaaatgatgacagagtatctgttattagaagcaattgatcaaggtaaagtgaaatgggaccaaacctatacgcctgatgactatgtgtatgaaatttcccaagataacagcttatcaaacgttcctcttcggaaagacgggaaatacacagtaaaagaattatatcaagctacagcaatttattctgcaaatgctgctgctattgcaattgcagaaatcgttgccggttctgaaactaagtttgttgaaaaaatgaatgcaaaagcaaaagaactaggcttaacagattacaaatttgttaacgcaacaggtcttgaaaacaaagatcttcacgggcatcagcctgaggggacaagcgtaaatgaagaaagtgaagtttctgcaaaggatatggcaattcttgcggatcacttgattactgactaccctgagatactggagacttccagtatcgccaaaacgaaattcagagaaggcaccgatgatgaaatggacatgccgaactggaattttatgctgaaggggcttgtcagcgagtataaaaaagcgactgtagacggactgaaaacaggttctactgactctgcgggttcatgctttacaggaacagctgaacgcaacggtatgcgtgtcatcactgttgttttaaacgcgaagggcaaccttcatacaggccgtttcgatgaaacgaaaaaaatgtttgattatgctttcgacaatttctccatgaaagaaatttatgctgaaggcgatcaagtaaaaggccataaaacaatttcagttgataagggtaaagagaaagaagtaggcattgtgacaaacaaggcgttctctcttcctgtcaaaaatggtgaagaaaagaattacaaagcgaaggtcacactgaataaagacaacttaactgctcctgtgaaaaaaggaaccaaggttgggaagctgactgcggaatacacaggtgatgaaaaggattacggattccttaacagcgatctggctggcgtagaccttgttacaaaagaaaatgtagaaaaagcaaactggtttgttttgacaatgcgcagtatcggcggattttttgccggaatttggggaagcattgttgatacggtaaccggctggttttaatcaattgaaagagctctgatggatgttagggctctttcgcgtaatatactgaaaaaacccaatttttaataaaaaatgattttcaaagcgctaaaaaccgaataaaatagtatatatccatatgaattattggatttctaggatacaataaggattagaaatcatataactataccttgattagggggaccaagaaatggctcaaacaggtactgaacgtgtaaaacgcggaatggcagaaatgcaaaaaggcggcgtcatcatggacgtcatcaatgcggaacaagcgaaaatcgctgaagaagctggagctgtcgctgtaatggcgctagaacgtgtgccagcagatattcgcgcggctggaggagttgcccgtatggctgaccctacaatcgtggaagaagtaatgaatgcagtatctatcccggtaatggcaaaagcgcgtatcggacatattgttgaagcgcgtgtgcttgaagctatgggtgttgactatattgatgaaagtgaagttctgacgccggctgacgaagaatttcatttaaataaaaatgaatacacagttccttttgtctgtggctgccgtgatcttggtgaagcaacacgccgtattgcggaaggtgcttctatgcttcgcacaaaaggtgagcctggaacaggtaatattgttgaggctgttcgccatatgcgtaaagttaacgctcaagtgcgcaaagtagttgcgatgagtgaggatgaactaatgacagaagcgaaaaatctaggtgctccttacgagcttcttcttcaaattaaaaaagacggcaagcttcctgtcgttaactttgccgctggcggtgtagcaactccagctgatgctgctctcatgatgcagctcggtgctgacggagtatttgttggttctggtattttcaaatcagacaaccctgctaaatttgcgaaagcaattgtggaagcaacaactcactttactgattacaaattaatcgctgagttgtcaaaagagcttggtactgcaatgaaagggattgaaatctcaaacttacttccagaacagcgtatgcaagaacgcggctggtaagaacataggagcgctgctgacatgttaacaataggtgtactaggacttcaaggagcagttagagagcacatccatgcgattgaagcatgcggcgcggctggtcttgtcgtaaaacgtccggagcagctgaacgaagttgacgggttgattttgccgggcggtgagagcacgacgatgcgccgtttgatcgatacgtatcaattcatggagccgcttcgtgaattcgctgctcagggcaaaccgatgtttggaacatgtgccggattaattatattagcaaaagaaattgccggttcagataatcctcatttaggtcttctgaatgtggttgtagaacgtaattcatttggccggcaggttgacagctttgaagctgatttaacaattaaaggcttggacgagccttttactggggtattcatccgtgctccgcatattttagaagctggtgaaaatgttgaagttctatcggagcataatggtcgtattgtagccgcgaaacaggggcaattccttggctgctcattccatccggagctgacagaagatcaccgagtgacgcagctgtttgttgaaatggttgaggaatataagcaaaaggcacttgtataaaacagttgaaagctgtggaaacttatagtacattataagcacaaataaagatcgaaaagcgttgataggaactagtagggagcctctctttctaagagagccgatggttggtgcgaatcggtgaaagatgctgtctgaatccatccttgagcgaaatgctgaagcgagtaggcatttacgggataaccgttatgtttgaaagtggaaaacgagtctttgatttgttttcaatcagggtggcaacgcgagagctctcgtccctttatggggatgagggctctttttattttcgataaatcaataaaaaaaggagtgtttcgcatgcttgatacgaaaatgctgagagcaaattttcaagaaattaaagcaaagcttgtacacaaaggcgaagacttaactgattttgataagtttgaggcgctggatgatagacgaagagagcttatcggcaaggttgaagagttaaaaggaaaacgaaatgaagtttctcagcaggttgctgtgctgaagcgtgagaaaaaagacgcggatcacattattaaagcaatgcgtgaagtcggcgaggaaattaaaaagctcgatgaagaattacggacagtggaagctgagcttgatacaatcctgctctcaatcccgaatattccgcatgagtctgtacctgtcggtgaaacagaagacgacaacgtagaagtgcgtaaatggggtgaaaagccttcatttgcttatgagccgaagccgcactgggatattgcggatgagctgggtattctggattttgaacgtgctgccaaagtaacaggaagccgtttcgtgttctataaaggcttaggtgctcgtctggagcgtgcgctttataactttatgcttgatctgcatgtggatgagtataactacactgaagtgatcccgccatatatggtaaaccgcgcaagcatgacgggaacggggcagcttcctaaatttgaagaggatgcatttaaaatcagagaagaagattatttcttaattccaacggcggaagtgccgattacaaacatgcatcgcgatgaaatcctttcaggtgacagcctgccgatcaactatgcggcattcagtgcttgcttccgttctgaagctggttcagcaggacgtgacacacgcggattaattcgtcagcaccaatttaataaagttgagcttgtaaagtttgtgaagcctgaagattcttatgaagaattagagaaacttacaaaccaagcagaacgggttcttcagctgcttgagcttccataccgtgtcatgagcatgtgtacgggtgacttaggctttacggctgcgaaaaaatacgatatcgaagtttggattccaagccaagacacatatcgagaaatctcttcttgcagcaacttcgaagcgttccaggcgagacgtgcgaatattcgtttcagacgtgaagctaaaggcaagcctgagcatgtacacacactgaacggttcaggactggcggttggaagaacagttgccgctatcttagaaaattatcagcaggaagacggaagcgttgtgattccgaaagtgctccgtccttatatggggaatagagaagtaatgaaaccgtaaattatggaaaggcgtgcctgacaaggtgcgcctttttgcttatgtaaacacggcattttcataaaaacaaaaaaagtttttaaaaatgcttgaccacacgagaacatacgtgatatagtaagtcttgtcgatacggaggaatacccaagtccggctgaagggatcggtcttgaaaaccgacaggggtgtcaaagcccgcgggggttcgaatccctcttcctccgccatattgattttaattctaatgaaacacaagcatatattggagattgttttgtccgttgcattcggtgcggcggattttttattttaaagaaaaagtgaatctcgactgagattcactttttttgattatcatgaataactgaagcaatttgatctacaatattttcaatcgagttttcgtcgttcagaagatcataatcttcaatgcgaagttttaaaacagggcaggcattaaaaccgcttatccagttctcgtagcgtgtatgcatttcttcccaataagacctgcttgtctgaagctccatctcacggccgcgttgttcaatccggtttaaaatgttctccagatctccttctaaatagatcagcacatctgggtgtgggaaatacggtgtcattaccattgcttcgaaaaggcttgtgtaagtcttataatcaacctttgacattgtccctttatcagcatgcatttttgcgaaaattcctgtatcttcataaatcgaacgatcctgtacaaaacctccgccggcttcaaaaattgttttctgttctttgaagcgttcagctaagaagtaaatttgaaggtgaaagctccaacgttcaaaatcatgatagaacttttccaagtatggattatgatcgacttcctccaaagatgttttaaatccaagccgtttagctaaagtttttgttaaagtcgattttccgacacctactgttcctgctactgtaataattgaattcttagggatatgatgttccttcatacgataagctcctttacatgggcggcaatgcgttcaaagtcgctcttattcaaaacgaaatcctttgaatcaccatctacggttaacactgtaagttcagggtctgcttcctgcagctgcttgatggcgacttcataatctgaaatcagctgctccaaatagctagtttcaatttttttctcaaaggggcgcccgcgtttttcaatgcggtgtagcaatgtaggcagactggcctttatgtaaatgatgaaattcggctttggcagatcatccgttagcaggtgatatatctttttgtatttttccagctgatgtggagacaaggtgcgttccgcaaaaatcacatttttataaatatgataatcagctattacaggctgtcccttttttaaaaagtgatcactggtgtcttcaagctgtttgtatctgtgacaaagaaaaaacatctcgagctggaagctccattcctctatattgtcataaaacttatcaaggtacgggttatcctctacaatctcattgatcatagggaatccgaattcttgtgagagcatcgttgcgagagttgtttttcctgccccgataggaccttctattgcaataaaaggggctgtattcatcggaatcctccttatatctgaaaaacgtgcgtcagttaccgaccttcatattgtatcacaacccttgggtgcccccatgaaaaaagacgtttccaaattatcgaaacgtctttttgacaacattaaattgatcagacagcagcagccagttttgtggaaaggaaagacccagcttccaatagctgatgcctcttaaattcagctctttaatcagattaaattttgcttgaatcgagcgggcatcctcgaaccatacctcgtgccttctgttttctgcatcagtatagcggaagaaaggagcttgagcggtttggtcatactgaatggaagcattgttctgatcagctatgacaatggcttgctgagggcttactgctcttgctggagttccccctgctgtatatggcagcgtccagtcatatccatataaattctggcccatgacaattttgttcgcaggcatttcagtcaaagcatattctatgacatcacggacaggtccaattggagaaaccgcttgaggcggcccgccgctatagccccattcatatgtcatgagaacaacaaagtcgacaatttggccatgcgccctgtaatcatgagcttcataccatctgccctgctgtgttgcacttgttttaggagcaagtgccgtagaaatttctaagccctctcgatgaaaaagatcccttgcttcgcggagaaattgattataggcctctctatcctggggccgcaaatattcaaagtcgaaatgaatgtcacggaagccatatctcttggcattctccactatttcatttagaagccttctttttacagtttcgtcgttcaaaaggatccggccaagttcatcactaaatgcctggttttctaggttcgttataatcatcatcaatgttgtattttgactttctgtaatgctccttaaattcgttaaaggcggtgcgactaaggttccgttccgctgtgcctggaagctgaatgcgccaaggtacgttaagtagggcgacgcttctctggccgcctgctggagattttcgctgacttgatttcctcggggctccaaataagcatttgattcgatgtctcgtttaggggctggtgggatgtatatacggaaaccaatctgaagcacggtatttaactggatgcggttaacccttgcgagctcggctgctgttgtattgaactgccgggcgatggatgtcagggtatcacctcgcttcacatcatagaactggccggctattggaatgacaatggtttgtccgacaacaaggctgtcgggattcggtatttcattcgtttcagtgatctcatttgcggttgttctgtattgtgaagcgatagcagaaagagtgtcgccttgttttaccacataaatttgaatgaaaaacgcctcctttcatatcgctatcaatgtatgaaagaaaagcgctgatcatgtttatttttctgtaatttgttcttccgtcgtaatttctgcgaaaagaacattctccatcatagttaaggcgaattcgttatcttcgtcactgtttgacgcgatacagtccttaggaatcgtgatgctgtattccctcatataagcgtcattagcggtaaacagcacacatatattgccggctatacctgttaagataatatgtctcacctgcaactcagtaagaagggtgtgaagtgcagtttcgtagaaagcggaatgttttggtttgattaaaaaataatcagcatcttccggggctatcttagtgatgatatccttgcttctttcatttgtgcattcttgctgaatgtttttaatgtcagcttgccaaagtccataatgatcattgatgtaaataatcggccattcattttgtctcgcgtgctcctttaatgataaaatatgaggaacgattttttctgtttttttagcgagggtttctcccatatcgaattcaaaattattgatcatgtctacaatgagaagggctgtatctgctttggacaatcgacagtctcctttccgtttcagttatagttaatatgtagcctttttaggcaatgaaaaaactttgaaaagagagcttatccttatgacacaagatgaactttatatgaaagaagcaattaaagaagcgaaaaaggctgaagagaaaggtgaagtgccaataggtgcggtgcttgtcgttaatgatgaaattatagcgcgtgcacataatttaagagagactgagcaacgatctattgcccatgcagaaatgcttgtgattgatgaagcgtgtaaggcactgggaacatggcggctggaaggtgcgactctttatgtgacgcttgagccttgtccaatgtgtgctggtgcagtcgtactttctcgagtggaaaaagtggtttttggcgcatttgatccgaaaggcggctgttcaggcacgctaatgaaccttctccaggaggaacgctttaatcatcaggctgaagtggtgagcggtgtacttgaggaagaatgcggcggaatgctcagtgcgtttttcagagaactaagaaaaaagaagaaagctgccaggaaaaacttgtctgaatagtacggttgcaatttttaggggaaacagatatacttaagtgtgcatcgtaatagatgcaacataaaatttgatatttattttgccgtgctaagcggggaggtagcggtgccctgtacctgcaatccgctctagcagggccgaatcccttctcgaggttcgtttactttaaggcctgccttaagtaagtggtgttgacgtttgggtcctgcgcaatgggaattcatgaaccatgtcaggtccggaaggaagcagcattaagtgaaacctctcatgtgccgcagggttgcctgggccgagctaactgcttaagtaacgcttagggtagcgaatcgacagaaggtgcacggtaaatcaatcatcaaattttcagactcacctaatattaggtgagttttttgttatgtaaaaagagcttttggaatcgaaacaaggttcatgtataatgggaatgatgaataacggaggagggcaaacccgtgagttaccaagctttatatcgagtattcaggcctcagcgctttgaagatgtggtcggacaagaacacattacaaaaacgctgcaaaatgcccttttgcaaaaaaagttttctcacgcctatctgttttccgggccaagaggaaccggaaaaaccagtgcagccaaaatatttgctaaggctgtcaactgtgaacatgctcctgttgatgagccatgcaacgaatgtgcggcctgtaaagggataacaaacgggtcaatatccgatgtcatagaaattgacgccgcttctaataacggtgttgatgagattcgtgacattcgcgataaagtgaagtttgccccgtcggccgtcacatataaggtatatatcatagatgaggtgcatatgctttctatcggcgcttttaatgcattactaaaaacattagaagagccgcctgagcattgtattttcatattagcaacaactgaaccacacaaaattcctttaaccattatctctagatgtcagcgttttgactttaaacgaattacctcccaggcgattgtaggccgcatgaataaaattgttgatgctgaacagctgcaagtggaggaaggatcgctggatatcatcgcgagtgctgcagacggagggatgagggatgccctgagccttcttgatcaggccatatcattcagcggcgatatcctgaaagtcgaagatgcgcttttaattacgggtgctgtttctcaattatatatcgggaagcttgcacaatccctgcatgataaaaacgtttctgacgcactggaaacattaaatgaattgcttcagcaaggaaaagatccagctaagctgatagaagatatgattttctatttcagggacatgctgctgtacaaaacagcccctggcttagagggagttcttgagaaagtaaaagttgatgaaacgttccgggaactaagtgaacaaattccggctcaggccctatatgaaatgattgatattctgaacaagagccatcaggaaatgaaatggacaaatcatccgcgtatctttttcgaagtggccgttgtgaagatttgccaaacctcacatcaatctgctgctgatctcccggaagtggatatgctgatgaaaaaaatccagcagctcgaacaggaagtagagcggctcaaaacaacgggcataaaagcagctgcggaaagcccgaaaaaagaagcgccgcgtgtgccaaagggcgggaaatccaattacaaagcgccagtaggcagaattcatgagattttgaaggaagccacaagaccggatcttgatctgctcagaaacagttggggcaagcttcttgctcatctcaaacagcaaaacaaagtatcacatgccgctttactgaatgacagtgaacctgtggctgccggatcggcggcatttgttctgaaattcaaatatgaaattcattgtaaaatggtcgctgaggataacaacggagtccggactaatcttgagcagattttagaatcgatgctcggaaaaagaatggatttgattggcgttccagaagcacaatggggtaaaataagagaagaatttttagaagatcatcagcaggaaaatgaaggatcaaatgaaccggctgaagaagacccgcttattgccgaagcgaaaaagcttgttggagcggatttaattgaaataaaagactaacaaaatgaaagagagtgaatgctatgcgtggcggaatgggtaatatgcaaaaaatgatgaaacaaatgcaaaaaatgcaaaaggacatggcgaaggctcaagaagagcttgcagaaaaggttgttgaaggaactgcaggcggcggtatggtaacagtaaaagcaaacggccaaaaagaaatcctggatgttatcatcaaagaagaagtcgttgatcctgaagatattgatatgcttcaagatttagtgcttgctgcaacgaatgaagctttgaaaaaagttgacgaaatcacaaacgaaacaatgggtcaatttacaaagggaatgaacatgccaggtttattctagggggataaaagaacatgcaatatcctgaaccaatatcaaagctgattgacagctttatgaaattgccagggatcggaccgaaaacagcggttcgtctggctttttttgttctaggtatgaaagaagatgtagtattagattttgcgaaagcattagtaaatgcgaaacgcaacctgacatattgttcagtttgcgggcatattacagatcaggacccttgctatatatgtgaagatacgcgcagggataagtctgttatctgtgttgtgcaagaccctaaggatgttatcgctatggagaaaatgaaggaatacaacggacagtatcacgttcttcacggcgctatttctccaatggacggcatcggaccggaggatattaaaataccagaattgttaaaacgattacaggatgatcaagtgacagaagtgatcctcgcgacaaaccctaatatagaaggggaagcaacggcgatgtatatatcaaggctcctcaagccgtctggtattaagctctcccgtattgcccacggactgcccgtcggcggtgacttggaatatgctgacgaggtcactctttctaaagcacttgaaggaagacgtgaattgtaaggaggaaaaagcgatccatgggttttcttcgcaagaaaacattaagaagagagtttgatgaaaaactaaccgagcagctttttaagcaaaaggaagagtggaacaggcaaaaaaagctggtcgaaaaaagcttagaaccgtctgctgaagtgttatacgaactgaaagtagctgaagcgaagtattttttttacttaagggaagcgaagcagcgaaatttaaaaatcagccggtggaagtaagtggtctaaactcctggatcttctcataagcttgtactagaacaagcgaaggagatgagaagattcatggagcctatttttattattgggattattttaggactggttattcttctttttttatcaggttcaactgcgaagcctttaaagtggatgggcatcacagctgttaaatttgtggcaggtgctttgctgctggtttgtgtaaatatgtttggcggcagtcttggcattcatgtgccgattaatctggttacaacagctatcagcggaattttagggatacccggaatagctgcgttagtcgttattaagcaatttatcatttaattgatattatgtattgacttagacaactgaaggtgttattctaatatacgtcgctgatgacgaacagcttttttgaaaaggaaatgctaaaaagttgttgacagtagcggcggtaaatgttatgataataaagtcgcttaaacgagcggtaaacaaagttctttgaaaactaaacaagacaaaatgtacctgttaattcatttttataaatcgcacagcgatgtgcgtagtcagtcaaactactttatcggagagtttgatcctggctcaggacgaacgctggcggcgtgcctaatacatgcaagtcgagcggacagatgggagcttgctccctgatgttagcggcggacgggtgagtaacacgtgggtaacctgcctgtaagactgggataactccgggaaaccggggctaataccggatggttgtttgaaccgcatggttcaaacataaaaggtggcttcggctaccacttacagatggacccgcggcgcattagctagttggtgaggtaacggctcaccaaggcaacgatgcgtagccgacctgagagggtgatcggccacactgggactgagacacggcccagactcctacgggaggcagcagtagggaatcttccgcaatggacgaaagtctgacggagcaacgccgcgtgagtgatgaaggttttcggatcgtaaagctctgttgttagggaagaacaagtaccgttcgaatagggcggtaccttgacggtacctaaccagaaagccacggctaactacgtgccagcagccgcggtaatacgtaggtggcaagcgttgtccggaattattgggcgtaaagggctcgcaggcggtttcttaagtctgatgtgaaagcccccggctcaaccggggagggtcattggaaactggggaacttgagtgcagaagaggagagtggaattccacgtgtagcggtgaaatgcgtagagatgtggaggaacaccagtggcgaaggcgactctctggtctgtaactgacgctgaggagcgaaagcgtggggagcgaacaggattagataccctggtagtccacgccgtaaacgatgagtgctaagtgttagggggtttccgccccttagtgctgcagctaacgcattaagcactccgcctggggagtacggtcgcaagactgaaactcaaaggaattgacgggggcccgcacaagcggtggagcatgtggtttaattcgaagcaacgcgaagaaccttaccaggtcttgacatcctctgacaatcctagagataggacgtccccttcgggggcagagtgacaggtggtgcatggttgtcgtcagctcgtgtcgtgagatgttgggttaagtcccgcaacgagcgcaacccttgatcttagttgccagcattcagttgggcactctaaggtgactgccggtgacaaaccggaggaaggtggggatgacgtcaaatcatcatgccccttatgacctgggctacacacgtgctacaatggacagaacaaagggcagcgaaaccgcgaggttaagccaatcccacaaatctgttctcagttcggatcgcagtctgcaactcgactgcgtgaagctggaatcgctagtaatcgcggatcagcatgccgcggtgaatacgttcccgggccttgtacacaccgcccgtcacaccacgagagtttgtaacacccgaagtcggtgaggtaaccttttaggagccagccgccgaaggtgggacagatgattggggtgaagtcgtaacaaggtagccgtatcggaaggtgcggctggatcacctcctttctaaggatattatacggaatataagaccttggctcttataaacagaacgttccctgtcttgtttagttttgaaggaactttgttccttgaataagttaagatgggcctgtagctcagctggttagagcgcacgcctgataagcgtgaggtcggtggttcgagtccactcaggcccaccatcttatataacggggccttagctcagctgggagagcgcctgctttgcacgcaggaggtcagcggttcgatcccgctaggctccaccaacgtgttctttgaaaactagataacagtagacatcacattcaattagtaacacaagatatcacatagtgattctttttaacggttaagttagaaagggcgcacggtggatgccttggcactaggagccgatgaaggacgggacgaacaccgatatgcttcggggagctgtaagcaagctttgatccggagatttccgaatggggaaacccaccactcgtaatggagtggtatccatatctgaattcataggatatgagaaggcagacccggggaactgaaacatctaagtacccggaggaagagaaagcaaatgcgattccctgagtagcggcgagcgaaacgggattagcccaaaccaagaggcttgcctcttggggttgtaggacactctatacggagttacaaaagaacgaggtagatgaagaggtctggaaaggcccgccataggaggtaacagccctgtagtcaaaacttcgttctctcctgagtggatcctgagtacggcggaacacgtgaaattccgtcggaatccgggaggaccatctcccaaggctaaatactccctagtgaccgatagtgaaccagtaccgtgagggaaaggtgaaaagcaccccggaaggggagtgaaagagatcctgaaaccgtgtgcctacaagtagtcagagcccgttaacgggtgatggcgtgccttttgtagaatgaaccggcgagttacgatcccgtgcaaggttaagcagaagatgcggagccgcagcgaaagcgagtctgaatagggcgcatgagtacgtggtcgtagacccgaaaccaggtgatctacccatgtccagggtgaagttcaggtaacactgaatggaggcccgaacccacgcacgttgaaaagtgcggggatgaggtgtgggtaggggtgaaatgccaatcgaacctggagatagctggttctctccgaaatagctttagggctagcctcaaggtaagagtcttggaggtagagcactgattggactaggggcccctaccgggttaccgaattcagtcaaactccgaatgccaatgacttatccttgggagtcagactgcgagtgataagatccgtagtcgaaagggaaacagcccagaccgccagctaaggtcccaaagtatacgttaagtggaaaaggatgtggagttgcttagacaaccaggatgttggcttagaagcagccaccatttaaagagtgcgtaatagctcactggtcgagtgactctgcgccgaaaatgtaccggggctaaacgtatcaccgaagctgcggactgttcttcgaacagtggtaggagagcgttctaagggctgtgaagccagaccggaaggactggtggagcgcttagaagtgagaatgccggtatgagtagcgaaagaggggtgagaatcccctccaccgaatgcctaaggtttcctgaggaaggctcgtccgctcagggttagtcgggacctaagccgaggccgaaaggcgtaggcgatggacaacaggttgatattcctgtaccacctcctcaccatttgagcaatggggggacgcaggaggatagggtaagcgcggtattggatatccgcgtccaagcagttaggctgggaaataggcaaatccgtttcccataaggctgagctgtgatggcgagcgaaatatagtagcgaagttcctgattccacactgccaagaaaagcctctagcgaggtgagaggtgcccgtaccgcaaaccgacacaggtaggcgaggagagaatcctaaggtgatcgagagaactctcgttaaggaactcggcaaaatgaccccgtaacttcgggagaaggggtgctctgttagggtgcaagcccgagagagccgcagtgaataggcccaggcgactgtttagcaaaaacacaggtctctgcgaagccgtaaggcgaagtataggggctgacgcctgcccggtgctggaaggttaagaggagcgcttagcgtaagcgaaggtgcgaattgaagccccagtaaacggcggccgtaactataacggtcctaaggtagcgaaattccttgtcgggtaagttccgacccgcacgaaaggcgcaacgatctgggcactgtctcaacgagagactcggtgaaattatagtacctgtgaagatgcaggttacccgcgacaggacggaaagaccccgtggagctttactgcagcctgatattgaatgttggtacagcttgtacaggataggtaggagccttggaaaccggagcgccagcttcggtggaggcatcggtgggatactaccctggctgtattgaccttctaacccgccgcccttatcgggcggggagacagtgtcaggtgggcagtttgactggggcggtcgcctcctaaaaggtaacggaggcgcccaaaggttccctcagaatggttggaaatcattcgcagagtgtaaaggcacaagggagcttgactgcgagacctacaagtcgagcagggacgaaagtcgggcttagtgatccggtggttccgcatggaagggccatcgctcaacggataaaagctaccccggggataacaggcttatctcccccaagagtccacatcgacggggaggtttggcacctcgatgtcggctcatcgcatcctggggctgtagtcggtcccaagggttgggctgttcgcccattaaagcggtacgcgagctgggttcagaacgtcgtgagacagttcggtccctatccgtcgcgggcgcaggaaatttgagaggagctgtccttagtacgagaggaccgggatggacgcaccgctggtgtaccagttgttctgccaagggcatcgctgggtagctatgtgcggacgggataagtgctgaaagcatctaagcatgaagcccccctcaagatgagatttcccattccgcaaggaagtaagatccctgaaagatgatcaggttgataggtctgaggtggaagtgtggcgacacatggagctgacagatactaatcgatcgaggacttaaccacattttgaatgatgtcacacctgttatctagttttgagagaacactctcaatttgtttggtggcgatagcgaagaggtcacacccgttcccataccgaacacggaagttaagctcttcagcgccgatggtagtcgggggtttccccctgtgagagtaggacgccgccaagcaagtttaaacccagctcattgagctgggttttttgtttacttaagatcgagaaaatcaaacaaatacaaacaccgagggcttatatagcccatatactgatttaaagtttcaaaaaggtctaaatagtgtatacaatatccgttttaaggggaggctaactgtacggaggtggagaagatggacgaaacagttaaacttaatcatacatgtgtgatttgtgatcaagagaagaatagaggcattcatctttatacgaaattcatatgcttagattgtgagagaaaagtaatttctacatcaacttctgatcctgactatgcgttttacgtaaaaaaactaaagagcattcatacaccgccattatattcatagacctgaaaaggtctttttttgtactcttaataataaaaagaagatgaaacttgtttaaggattgaacgtagtagataataatattaaaactgagtatagacacaggagtcgattatctcatgcagagattttttcactttttgatgtggagtttaactagcagtgcgacttttgttttcattggaatattgagcttttttggtttaaaccagtcgctttttttatctattgtttatgggcttgcttctggagcagccgtatatatagctggcatctggaatgcaagacggttatttcttaaaaagcatgaattgacaggaagagagtatgcttacattaagaaaaacttagaggaagcaaggcagaaaatgatccgtcttaggaaagccttgtttcaggctaaaagcattcaaatgtttaagcaaaatgcagaaatgctaaggattgtgagaaggatttatctcctcaccaaaaaagagccaaagcggttttatcaggcagaacgatttttttatcaaactctcgattcggttgttgaattaacagagaagtatgcttttctatcatctcaccccaaaaaaagcaaagaactttcgatgtcgttaagtgagacacgcatcactcttactaaattgaccaagcgtttagaggaagatttaactcaagtaatgggtgatgaaattgacgagttgcactttgaattagacgcagcaaaacattcattaaagaaataagggaagagggtaagagcgatgaaccgagaccaaagcgaccttcatatagatgaattattggcagatccttttggtggtaacatagagataccaggttcggaggctgtaaaagcagagaaagagcaagtacggcttgttgatgttcttcctgaggaaaacaagaaaaaagcaattcagcttgctggacagattgatcataaaaatatgcaaagcattgtcttatacggttcacaagctcaatctaaactgctgaacttttctcatgatatgattaatcatgttcaaaagaaggatgtcggggaaattggcgaaatacttggagagctgatgaaaaagctggagcaagtaaatcctgatgatctccaatctaagaaaaagggttttttggcacgcatgtttggaagagtatcaagttctcttcaagaggtgctgtctaaataccaaaagaccagtgtgcagatagacaaaatcagcttgaagctggagcactctaaaaatgctttaattagtgacaacaagctgttagagcagttatatgaaaaaaataaagaatattttgccgcgctgaatgtttatattgctgcaggagaactgaagctggaggaattaaaaacaaaaacgattcctgaactgaagcaacaggctgaatcgagtgatcataaccaaatggccgttcaagaggtgaatgatttaattcaatttgctgaccggttagataaaagggtgcatgatttgctgctgagcaggcaaattacaatccaaagtgcaccgcaaatcaggctgattcaaaacacaaaccaagcgttagcagaaaagattcagtcatccattgtgacagcgattccgctatggaaaaatcaagttgccattgcactgacgcttttaaggcagcgcaatgcagtggatgcacaacagaaagtatctgatacaaccaatgagcttttgctgaaaaatgcggagcttttaaaaaccaatacaattgaaactgtacgagcaaatgaacgaggccttgttgatatagataccttaaaaaaggtgcaggaaagcttaataagcacgcttgaagaaacactgactatacaagaagaaggacgaatcaaacgccgtcaggcagaagaagagctgatgatgatggaaggcgacctaaagcaaaagctgcttacaataaaggaaagatagttaccagtaagtctggctttaagttctgtcagaggcacgatataataaggtgtaagaagacacattcaaaggattgttttcatgaacacacctttatataaagcattaattcaacatgcgagaagaaattctcattcatttcatgttccgggacatcacaatggagatgtcttttttgatgacgctaagtcaatattcaatccgcttctcaccattgatgtaactgaactggcaggactggatgatctccatcatccttctggggtgattaaggaagctcaggagcttgccagtcaattatatggatcggcggaaagtttttttctggtaaatggtacgactgtcggaaacttagcgatgattttatctgtttgtgaacctggtgatacaattctggttcaaagaaactgtcataaatctgtatttcatgctgttgatttgtccggtgctgagccggtttatcttgcacctgacgttgattcagcgatgcatgtgcctacgcatgttccgcttggaacaattaaagaggccctggaagcatatccagatgcgaaaggcttggtactgaccaatccgacatattacggacatagtgctgatttgactgagatcattactgaagcccatcattacgggattcctgttttggtcgatgaagcgcatggcgcacattttattttaggtgagccttttccggtctcagctttaaaaatgggggcagatattgttgttcagtcggcccacaaaacgttgcctgccatgacgatgggttcttatttgcatctcaacagcagctgcaggattaacagggatcgggtggcagagtatttaaaccgattacaaagcagcagcccgtcttatccgattatggcttcgttagatattgcccgcgcttatgtacagcatattatagaagaacaaaagctttctgacattctgcagcggatagaaacacttaaacaaacgtttgattcacttacaaatgcagaagctgttaaccctgctaatccactgatcatcacggatccgctaaagctcacaattcgttcaaaacgcggacattctggctatacgctgcaaagcatattagagcgtgccaacatattcactgagcttgctgatgaaaatcaagtactgctcgttctcccattgggaggaaaacggagaataaatgctgaaaccattagaagcattgatgaagagattgagaaaacgcctccggatcaggcgtttgtttctgcagaatggggagtgcagcctgttactgtcttgccttatccaaaaaaggtcttacattcgtttaagaaagaatatgtggactttgaggaagcagctggccggctgaatgcagaagatatcatcccttatcctccgggtatcccgatgattatggcgggagaaagaataacaaaagaaagtgtgcaaaagctcagccgcttgatcagcatgaaaacgcatgttcaagggaatatgaaaatcaaagagaaacaactacttgtttatatagaagaggagaaatcatgagcggtttatttattacattcgaaggtcctgaaggtgcagggaaaacgactgttctgcaggagatcaaaaacatactgacagcagaaggccttcaggttatggcaactcgagagccaggcggaatagatattgcagaacaaattcgagaggttattctgaatgagaacaatatattaatggacccaaaaacagaagctctcttatatgcggctgcaagacgccagcatttagttgaaaaagtaaaacctgctttagaacagggggttatcgttctttgcgacagattcatagacagttctcttgcgtatcaaggatatgcaagagggcttggaattgatgaggttctgtccattaatgaatttgccattggagatatgatgccccatgtaacggtttatttttcaattgatccggaagaaggactgaagcgtatttacgcaaacggctcacgggagaaaaacaggctcgatttagaaaaactggactttcatacaaaagtacaagaaggttatcaagagctgatgaagcgatttccggaaagatttcattcagttgatgccgggcaatccaaagacctcgtcgttcaggatgttctaaaggtgatcgatgaagcgttgaaaaaaattcaattgtgacctgtttcccaatagttgatataataatgtaaacgagatcacgttgtttccaatctaaaggaggccttcacagatgaaattgatagtggcagttgtacaagatcaggacagcaacagacttttgaaaaccttaacggatcacaacttcagagtcacaaagcttgcgacgacaggaggatttcttaaatcaggcaatacaacgtttatgatcggtgtcgaggatatacgcgtcaataaagcgttgagtctcattaaagaaaacgggcagaaacgtgatcagatgattgcccctgtatctccaatgggtggaaatgctgattcctatgtcccttatccagtcgaagttgaagttggcggagcgacagtatttgtccttccagtcgatgaatttcatcaattttaaggatctgaaactgtgaaaattaataaagatatacgtacatttatagataataagcagattccctctgtgaaaacatctgagatcacggcatcgtttaaaacatcaatggaaaaccaaagcagcaaaatgaagcttgatcagcttaccaggttgttatctgatatagaagcattcggaaaaaggctaacgaaatctcggaattttaaagacttagcgagatttaaaggacttgtgaaacgttttgtcaaggaagctgtggacagcggcctttcacatgaaacatcgaaaagctttgacctttacgggaacagcagaacgctgggacttgtgaaagaaatagatgacaaattgatacagcttacggaagagatgatggatcaggaaaaaccggcaattgatttgctggagcgtattggcgaaataaaaggtttattaattaacctttacacatagagagtgatacaatggcaatatcctggaaggaaatgaacgagcttcagcccagagtgatgaagcttttatataatagtattgagaaggacagactatcacacgcttatttgtttgagggaaaaaaaggaacaggcaagcttgatgccgcgctgcttcttgcaaaaagcttcttttgtctggaggatggcgcggagccttgtgagagctgccgaaactgtaaacggatagagtcagggaaccatcctgatctccatcttgttcagcctgatggcttatcaatcaaaaaggcgcaaattcaagcgctccaagaagagttttctaagacaggacttgaatcgcataaaaagctgtatattatttcgcacgcagatcaaatgacagcaaatgcggcgaacagcctgctgaaatttttagaagaacctaacaaagacacaatggccgtcctcatcactgagcagccccaaaggttattggataccatcatttcaagatgccaaacccttccttttcagcctttgcagccgaaagcaattgaagatagactgatcgaacaggacgtctcgcctcatatggcaaggcttctagccaacatgaccaataatgtagcagaagcagtcgaattaagtcgaaatgatgagtttgcagagtctagagcgaaagtgataaaattgtatgaagtcctacaccagcggaaaggacatgcttttttctttattcaagatcaatggatgccctttttcaaagaaaaaacccatcaagaaatgggtcttgatatgctcttattgatatatcgtgatgtgttgtccatccaaataggaaatgaagataaattgatttatcaagacttattccaatcaataaaacagcatgcgctacaatcaacacaacaaagcgttacgaatcagatacttgctgttttagaagcaaagaaacggcttcattccaatgtgaatgtacaaggattaatggagcacttggtgttaatgttgcaggagggataagcttgtacaatgtaattggtgtccgctttaagaaagcgggtaaaatatattattttgatccgaatggatttcatatagaacatgacagctgcgtaattgtagaaactgtcagaggcgttgagtacggccaggtcgtaattgcaaataaacaggtggatgagcatgatgtggtgcttccccttcgaaaagtgatacgtgtggctgacgagcgcgatcttctcattgtagaagaaaataaacaggaagcactatcagcatttgatatctgccaaaagaaagtgattgagcatggcttggatatgaagctggtcgatgttgaattcacgtttgatcgcaataaagtcattttttacttcactgctgacggccgagtcgactttagagagcttgtaaaggatttggcttctatctttaagacaagaattgagctgcgccaaatcggagtgagggatgaggcaaaaatgctcgggggaatcggtccttgcggaagaatgctttgctgttcaacgtttcttggagattttgaacctgtttccattaaaatggccaaggatcagaacttgtctttaaatcctacgaagatttcgggtctttgcggacgattgatgtgctgtctaaaatatgagaacgatgagtatgagacggcaaaagaacagcttccggatataggagaaatgattacgacagcaaacggtcccgcgaaggtcgtcggactaaatattctggaacgggtgcttcaggtggaactgataaaccgtgaaaaagtgatagaatatacttgggaagagctcttggaagagggcgtcgtatccgcacaaaccacagattaacgaggtgtggaaccttggataaaaaagagttatttgatacagtcattaacttagaagaacaaattggctcactgtacaggcagctgggggatttgaagcagcatatcggtgagatgattgaggaaaatcatcatttacagcttgaaaacaagcatttgcgcaaacggctggacgatacgacgcagcagattgaaaagttcaaagctgataaaaaagaatcaaaaacacagaagacagagcaaactgatataggggaaggatatgataatctggcacgtctgtatcaagaaggatttcatatctgcaatgtccactatggtagtgttcgaaaagaagattgtcttttctgtctgtcattcttaaataaaaaatagggaaaaggcttccgcataagacgggagcctttttcaaaggtactgaaaggataagaagatggtttcattacatgatgatgaaagattagattatttgctggcagaggacatgaaaatcatacaaagcccaacagtgtttgctttttcgttggacgctgtgcttctgtccaaatttgcgtacgttccgattcaaaaagggaaaatcgttgatttatgcaccggcaatggtattgtgccgctgctgctcagtacaagatcaaaagcagacattctgggagtcgaaatacaagaaaggctgcatgatatggctgttcgcagcgtggagtataataagttggacgatcagattcagatcatacatgatgacctgaaaaacatgccggagaaacttggacataatcgatatgatgttgtcacctgcaatccgccgtattttaaaacaccgaaacaaactgaacaaaacatgaatgagcatctccgaatcgcaagacatgaaatccactgcacactggaggatgtcatttcagtcagcagcaagctgctcaagcaagggggaaaagcagctcttgttcaccggccgggaaggcttctggagatttttgaactgatgaaggcttatcaaatcgagccaaaacgtgtacaatttgtctatccgaagcaagggaaagaagccaataccattttggttgaaggtatcaaaggcgggcgcccggatttaaaaattcttcctcccttattcgtttatgatgaacaaaatgaatatacaaaagaaatcaggaccattttatatggagacaaataaccatttcttctacgtcgtgaaatgtaaggacaatagctggtatgccggatataccaacgatctgcataaacgagtgaaaacgcacaatgatggaaagggcgcaaagtacacaaaagtaagacgtccggttgaattaatttttgccgagagcttttcaacaaagcgggaagctatgcaggcggaatattatttcaaaaaactaactcggaagaaaaaagagctttatatagaagaaaagcggaacagcaaggaggctgtatatgttaaggcgccaaatgagctttaatggaaagtcggacatggggattctttacttggtcccaaccccaatcggaaatctagaggatatgacattccgggcgatcgacacgctgaaatcggtggatgcgattgctgcggaagatacgaggcaaacgaaaaagctttgtcatgtatatgaaattgaaacaccgctcgtcagctatcacgaacacaataaagaaagcagtgggcacaaaattattgaatggctgaagtcgggaaaaaacattgctcttgtcagtgatgccggtctgccgacgatttctgatcccggagcggaaattgtaaaggattttacggatataggcggttatgttgttccgttgccgggagcaaatgccgcattaacagctcttattgcttcaggtattgtaccgcagccttttttcttttacggttttctcaacagacagaaaaaagaaaagaagaaggagcttgaagcccttaaaaaacggcgggaaacgatcattttttatgaagcgcctcacagattgaaggaaaccttgtcagcgatggcagagatattaggagatcgggaaattgctgtaacgcgtgaactcactaagaaatatgaagagtttatccgaggaaccatatctgaggtcattggatgggcaaacgaagatcagatacgcggcgagttttgtcttgtcgtagaaggaagtaataatgaagaggtagatgaggaagaacaatggtgggaaaccctcactgcgaaagaacatgtcgagcattacatctcgaaaggcgctacgtctaaagaagccattaaaaaagcagcagtcgatcgcaatgtaccaaagcgtgaagtgtacgatgcttaccatattaagcaataaaaaaacgttcttgtgtcataacaagaacgttttttgtacaagaaatgattatttaaggttttgaagctggttttggatttcgctgatgatttgctcagcgccttctttactaagaaccaatttaccgcctgcaagtttaaggttatcatcagaaacttcaccagttacttggcaagtcatgtttggtttatattttttaaggatgattttttcatcatcaacatagatttcaagagcatctttttctgcgattccaagagtacgacgcagttcgataggaataactacacgtcctaattcatcaactttacgtacaataccagtagatttcataaacattctcctcccaagagatacttatttgtttaaattatatttttcttcgtcattattcgacaaaatccttaccttcatagcataacaaggtttccaataatcgtcaatcattttgtttactattgattgtaagaattagttcttatagtcagtaatgtcttagaaactaccgaaataacagcattttataaatatttaataaagctattatcctactaaaaatccttttaaatcaagactttcgaaccaaagttttttatttcatttgattatatacgacaaaattcgacacgaacagactttttttattttcattaaagatttttaattttaattattctttttcagggcgtatgtatatattcttgatcttaaaggctaagatggtatcatagataaaggataaatataaataatattcatatatgatttgcacttatcgccgctctcgtcctttgggcgggagctttttgacattctgattaggaggtttcaagatgccgcaagaaaacaatacattttacattacaacaccgatttattatccgagcggaaaattacatatcggccatgcatatacgacagtcgcgggagatgcaatggcacgttacaaaagattaaaagggttcgatgttcgctatttaacgggaacggacgagcatggacaaaagatccagcaaaaagctgaacaggaaaacattacacctcaggagtatgtggatcgcgcagcggcagatattcaaaaactgtggaagcagcttgaaatctcaaacgacgactttatccgcacgacagaaaaacggcataaagttgtcattgaaaaggtgtttcaaaagcttcttgataacggggacatctatcttgatgagtatgaaggctggtacagcatccctgatgaaacgttctacacggaaactcagctcgttgatattgagcggaatgaaaagggagaggtcatcggcgggaaaagccctgacagcggtcacccagttgaattgatcaaagaggaatcttatttcttccgcatggggaaatacgcggatcgtcttctgaaatactatgaagaaaacccgacattcattcagccagaatcacgcaaaaacgaaatgattaataactttatcaaacctggacttgaggatttggcagtatcacgtaccacttttgattggggcgtgaaggtgccggaaaatccaaagcatgttgtatatgtttggattgacgcactatttaactatttaacggcactcggttatgatacagaaaatgatgagctttatcaaaaatattggcctgccgatgttcatttagtcggtaaggagattgtacgattccatactatttactggccaattatgctgatggcgctggatcttccgctgccaaagcaagtattcgcgcatggctggcttttgatgaaagacggaaaaatgtcgaaatcaaaaggaaacgttgtagatccggttacattaattgagcgctatggtttagacgagcttcgctattacctgcttcgcgaagtgccgttcggatctgacggagtattcacgccggaaggatttgttgagcggattaactatgatttagcaaatgatttaggaaatctattgaatcgtactgttgcgatgattaataagtattttgacggacaaatcggttcttacaaaggtgctgttacggaatttgaccatacgctaacttctgttgctgaagaaacagtaaaagcttatgagaaagcaatggaaaatatggagttctcggtagcactttcgactttatggcagctcatcagccgcacaaacaaatacattgatgagacagctccatgggtgcttgcgaaagatccggcaaaagaagaagaattgcgatcagttatgtatcatctcgctgaatcattgcgtatttcagcggtactgcttcagccattcttaacaaaaacacctgaaaaaatgttcgagcagctgggcattactgatgaatctttaaaagcttgggacagcattacagctttcggccagctgaaagatacaaaagtacaaaaaggcgagccattgttccctcgtttagaggcagaagaagaaattgcttacatcaaagggaaaatgcaaggttcagcaccagcgaaagaagaaacaaaagaagaagagcctcaagaggtcgatcgtttacctgaaattacgattgatcaattcatggatgtagagcttcgcgtagctgaggtcattgaggcagaaccagtgaaaaaagcagaccgtttattgaagctgcagcttgatcttggttttgaaaagcgccaagtggtatccggcattgcgaagcattatacgcctgaagagcttgttggaaaaaaactcgtttgtgtaacaaatctaaaaccggttaaactcagaggagagctttctcaaggtatgatccttgcaggagaagcagacggcgttttaaaggtcgtgtctatcgatcagtcgttaccaaaaggcacaagaattaaataatgataaaacaaaaggtgtttcacgtgtaacaattcgtcgaacaccttttgtgtttcgacaagaaaggagtttttcacttatgttgtttgacacacacgcgcatttaaatgcagaacaatatgatactgatcttgaagaggttattgaacgggcaaaagctgaaaaagttgaacgaattgtcgtagttggttttgaccgtccgacgattacccgtgcgatggaaatgattgaggaatatgattttatttatgcagccattggctggcaccctgttgacgctattgacatgacagaggaagacttagcgtggattaaagagctttctgctcatgagaaagtggtagcgataggggaaatgggactggattatcattgggataaatcacctaaagatattcaaaaagaggtgtttagaaaacaaatcgccttagcgaaagaggtcaatttgcctattatcattcataaccgtgatgcaacggaggatgtcgtgaccattttgaaagaggaaggcgcagaagctgtgggcggaatcatgcactgctttacaggaagtgcggaagtggcaagagaatgcatgaaaatgaatttttatttatcatttgggggaccggtgacatttaaaaatgcgaagaaaccgaaggaagtagtgaaggaaattcccaatgaccggctgctgattgaaacggactgcccgtttctcacaccgcaccctttccgcgggaaaagaaatgagccaagctatgtgaaatatgtggcagaacaaatcgccgaattaaaagaaatgacctttgaagagattgcttccatcacgactgaaaatgcgaaaagacttttccgtataaactgacaaaaaacgctagcgggttttgtaagagcttgtcccttacagcgtttttctataaaagttctacatgctttcttctcctcataggataggtttgtcgacaagtctttcttccgtttctcagtgtatttcaggataatgaagaggacactgagcttttgggagaaagagaagggagggttgacagccttttagatactctatataatctctccgaggagaaggaggcgtttttcatcacacaaaaaatgaaaaagctgttttccgtaaagcttagcaaaagcaaagtcattctggttgctgcttgtttgcttttggcaggaagcgggactgcgtacgcggctcatgagctgacgaaacaatcagtctcagtttctatcaatggcaaaaagaaacatatacgcacacatgcaaatacagtcggtgatcttttggagacgcttgatataaagacaagagacgaagacaagatcacacctgctaaacagacaaagataacagcagacatggacgttgtgtatgaggctgcaaaacctgtgaagcttacaataaacggggaagaaaagacgttatggtcaacagcaaaaacggtcggtgcattactggacgaacaagatgttgatgtgaaagaacaagatcaaattgatcccgtaatagatacagatatttcgaaagacatgaagattaacatagagcccgcatttcaggttactgtgaatgatgcagggaaacaaaagaagatctggacgacttcgactacggtcgctgactttttaaaacagcaaaagatgaacataaaagacgaagataaaatcaagcctgcgttagatgcaaagctgacgaaaggaaaggctgatattacaattactcgtatcgaaaaggtcaccgatgtagttgaagagaagattgcgttcgatgtgaaaaagcaagaagacgcttctcttgaaaaagggaaagaaaaggtcgtccaaaaaggaaaagaaggcaagctaaaaaaacatttcgaagtcgttaaagaaaatggcaaagaagtgtccagagagcttgtaaaagaagaaacagctgagcaaagcaaagataaagtgattgctgtcggcacaaagcaaagcagtccaaaagttgaaacggtcagtgcttcaggtgattcaaaaacagttgtgtcccgcagcaatgaatcaacaggcaaagtcatgactgtatcatctacggcttatacggcaagctgcagcggttgttcaggacatacagcgacaggcgtcaatttaaaaaataatccgaatgccaaagtcatcgctgtggatccaaatgtcattccgctaggctccaaagtccacgtggaaggctatggatatgccattgctgcagataccggttcagcgattaaagggaacaaaatagacgtctttttcccagagaaatcatcggcgtaccgatggggaaataaaacagtcaaaattaaaatcttaaattaatatatacttatgtattcagagggttttgcgccctctgtttttttcgttataatagacaaagtgcattttctgcttattagacgctcgatataagaaaaagtttcatgaatatacaaaagtttttattttgtcttggaggaaataatgaaaattaaagagatcattgtggtcgaggggcgtgacgatacggcccgcatcaaattggctgttgatgcagacacaattgaaacaaatggttcagccatcgatgatcatgtgattgaccaaatccgtttggcccagaagaccagaggcgtcattattttaacggatccggactttccgggagagaagattcgcaaaaccatctcagaggctgtacctggctgtaagcatgcatttttgccaaaacatcttgccaaacctaaaaacaagcggggaattggtgtagagcatgcatcggttgaaagcattagggcatgtttagaaaatgtgcatgaggagatggaagcgcagccgagtgacatttcagctgaggatttgattcatgccggactaataggcgggcctgcggccaaacgccgccgggaacgactgggtgatctgttgaaaatcggctatacaaatggcaaacagcttcaaaaacggctgcaaatgtttcaaattaaaaaaagtgattttatgagtgcgctcgataccgttatgcgggaggaacagaatgaataaagatattgcgacaccgattagaacgaaagagatactgaagaaatacggtttttcttttaaaaagagcttaggacagaatttcttaattgatacgaacattttaaacagaattgtcgatcacgcggaagtgacggagaaaacaggtgtcattgaaatcggcccgggaatcggggctttaaccgaacagcttgccaagcgggcgaaaaaggtcgtggcatttgagattgaccagcgactattgccgattctgaaggatacactgtcaccttacgacaatgtcactgtcattcatcaggacgtgttaaaggctgatgtcaaatcagtcattgaagaacaatttcaagattgtgatgagatcatggtagttgccaaccttccttattacgtaacaacaccgattatcatgaaactgcttgaagaacaccttccgctgaaagggattgtggtcatgctgcaaaaagaagtggctgagcgcatggcggctgatccttcatctaaggaatacggctcgctttcaatcgcggtgcagttttatacagaagccaaaacggtgatgatcgttccgaaaaccgtatttgttcctcagcctaatgtcgattccgcagtcatccgtctgattctccgagacggcccggcagtggacgtggaaaacgaatcctttttctttcagctcatcaaggcaagctttgcacagcgtcgtaaaacgctgctcaataacttagttaacaatctgcctgaaggaaaagcgcaaaaatcaacgattgagcaagtgctcgaagaaacaaatattgacggtaagcgccgaggcgaatccctgtctattgaggagttcgcagcgctgtctaacggattgtataaagcccttttctaaaagggctttttgttttgcgcaccacatggactgccgctacataggctagagaaggacctttcattcaatgataagaaaaaacttggactcagcgaaaaaaggcgctttctcaaggctctttctttcatgatgaggcttagtctatgtgtggagtgaggaatgtgcaatttcaaataggggatatggtagccagaaaatcctatcagatggatgttttgtttcgaattataggaatagagcaaacaagcaaaggaaattcaattgccattttgcatggagatgaagtcaggctgattgctgattcggatttttctgatctggtagcagtgaaaaaagatgagcagatgatgcggaaaaagaaagatgagagcagaatgaatgagtcgctcgaattgctccgccaagattataagctgctcagagaaaagcaggagtactatgcgacaagccaatatcagcatcaggagcattatttccatatgccgggcaaagtgcttcatctggatggcgatgaagcatatctgaaaaaatgcctgaatgtctataaaaaaattggagtgccggtctatggcatccattgccatgaaaagaaaatgtctgcttctattgaagaattgctcgacaaatatcgacctgatatcctggtgatcacagggcatgatgcgtattcgaagcaaaagggcggcattgatgatttgaatgcgtacagacattctaagcactttgttgaaactgttcaaacagcccgaaaaaagatccctcacttagatcagcttgttatttttgcgggggcctgccaatcccattttgaatcactcatcagagcgggtgcgaattttgcgagttcaccgtcaagagtcaatattcatgcgcttgatccggtatatatcgtcgcgaagatcagctttacgccgtttatggaacggattaatgtatgggaagtgctccgtaatacgctgacaagagagaaagggcttggaggtattgaaacaagaggagttctgagaattggtatgccttataagtccaattaacagttgaaaacctgcataggagagctatgcgggttttttattttacataatgatacataatttaccgaaacttgcggaacataattgaggaatcatagaattttgtcaaaataattttattgacaacgtcttattaacgttgatataatttaaattttatttgacaaaaatgggctcgtgttgtacaataaatgtagtgaggtggatgcaatggcgaagacgttgtccgatattaaaagatcgcttgatgggaatttaggtaaaaggctgacgttaaaagcaaacggtggccgccgaaaaacgattgagcgttcgggcattttagctgagacgtacccttctgtttttgtgatacaactagatcaagacgagaactcgtttgaaagagtttcatacagttatgctgatattttgactgagactgttgagctgacatttaatgatgacgccgcaagctcagtggcattttaacgggcagtgaaccttttgtttactgctttttgttttgcccttttttggtttccaataattttaacgaaagttccatctgatttaacaaaagataaaacagtcacatattatcgtgacgtgcacgaatggctatcacttctaaaaaaggggttgtttcgtttgggcagacgtcgtggagttatgtcagatgagtttaaatatgagctggctaaagaccttggtttttatgacacagtaaaaaatggcggctggggcgaaattcgggctcgcgatgccggtaacatggtaaagcgcgctattgaaatcgccgaacagcaaatggctcagaatcagaataaccgataaggatgtgacccgggggacgtgctgttccctggtttttttattttggatataaatacataatgggctgaatatggatatgttcatcctgtacttcaaatgtgatacaatgttcatacttatgtttagatggagaagtaggtgaaagctatgcgtattttagaaaaagcgccagctaagatcaatctgtcacttgacgtcacccgaaaacgcccggatggctatcatgaagtcgaaatgatcatgacgacaattgatttagctgatcgaattgaattgacggagcttgcagaggatgaagtgagggtttcctcccacaaccgatttgtgcctgatgaccaaagaaacttagcttatcaggctgccaagctgatcaaggacagatacaacgtgaaaaagggagtttccatcatgattacgaaggtaattccggtggctgccggtcttgccggcggaagcagtgatgcggcggcgacactcagagggctgaacagactgtggaatttaaatctgtccgcggaaacgcttgctgagcttggagcggaaattggctctgacgtttcattttgtgtctatggcggaactgcattagcaacagggcgcggcgagaaaattaaacatatcagcacgcctccgcactgctgggtcattttagcgaagccgacaatcggtgtttcaactgctgaagtgtacagagcgctgaaactggatggtatagagcatcccgatgtacaaggcatgatcgaggcgatagaagagaagagttttcagaagatgtgcagccgtttaggcaatgtgcttgaatctgttacactcgatatgcatcctgaagttgcaatgatcaaaaaccagatgaaacgctttggtgcagatgccgtgttaatgagcgggagcggcccgacagtgtttggactggttcagtatgagtcgaaggtgcagagaatttataacgggttaagaggcttctgcgatcaagtttatgcggtgagaatgatcggcgaacagaacgctcttgattaaatccgtatgttaagttatattgatcttaaaatattcggattttgggggtaagttcatgaagtttcgtcgcagcggcagattggtggacttaacaaattatttgttaacccatccgcacgagttaataccgctaacctttttctctgagcggtatgaatctgcaaaatcatcgatcagtgaagatttaacaattattaaacaaacctttgaacagcaggggattggtactttgcttactgttcccggggctgccggaggcgttaaatatattccgaaaatgaagcaggctgaagctgaagagtttgtgcagacacttggacagtcgctggcaaatcctgagcgtatccttccgggcggttatgtatatttaacggatatcttaggaaagccatctgtactctccaaggtagggaagctgtttgcttccgtgtttgcagagcgcgaaattgatgttgtcatgaccgttgccacgaaaggcatccctcttgcgtatgcagctgcaagctatttgaatgtgcctgttgtgatcgttcgtaaagacaataaggtaacagagggctccacagtcagcattaattacgtttcaggctcctcaaaccgtattcaaacaatgtcacttgcgaaaagaagcatgaaaacgggttcaaacgtactcattattgatgactttatgaaagcaggcggcacaattaatggtatgattaacctgttggatgagtttaacgcaaatgtggcgggaatcggcgtcttagttgaagccgaaggagtagatgaacgtcttgttgacgaatatatgtcacttcttactctttcaaccatcaacatgaaagagaagtccattgaaattcagaatggcaattttctgcgtttttttaaagacaatcttttaaagaatggagagacagaatcatgacaaaagcagtccacacaaaacatgccccagcggcaatcgggccttattcacaagggattatcgtcaacaatatgttttacagctcaggccaaatccctttgactccttcaggcgaaatggtgaacggcgatattaaggagcagactcatcaagtattcagcaatttaaaggcggttctggaagaagcgggtgcttcttttgaaacagttgtaaaagcaactgtatttatcgcggatatggaacagtttgcggaagtaaacgaagtgtacggacaatactttgacactcacaaaccggcgagatcttgtgttgaagtcgcgagactcccgaaggatgcgttagtcgagatcgaagttattgcactggtgaaataataagaaaagtgattctgggagagcccgggatcacttttttatttaccttatgcccgaaatgaaagctttatgacctaattgtgtaactatatcctattttttcaaaaaatattttaaaaacgagcaggatttcagaaaaaatcgtggaattgatacactaatgcttttatatagggaaaaggtggtgaactactgtggaagttactgacgtaagattacgccgcgtgaataccgatggtcgcatgagagcgattgcatccatcacgctggatcacgaatttgttgtacatgatattcgtgtgattgatggaaacaatggtcttttcgttgcgatgccgagtaaacgcacccctgatggagagttccgcgatattgctcatcctattaattcaagcacgcgaggaaagattcaagatgccgtgttaaatgagtatcatcgtctgggtgacactgaagcattagaattcgaagaagctggagcttcttaaaaaataaccaaaaagcaaggactgctgaaagggctgacataagccttttgccggcggtccttttttaattctgatttttcaaacttagttgcactcaatagaaaattcttgcacttcatgaagtctccttgaaatcagaagatatttaggatatatttttctatggataaaagggatattggaggccaataaatggataagcggtttgcagttgttttagcggctggacaaggaacgagaatgaaatcgaagctttataaagtccttcatccagtttgcggtaagcctatggtagagcacgtcgtggacgaagccttaaaattatctttatcgaagcttgtcacgattgtcggacatggtgcggaagaagtgaaaaagcagcttggtgataaaagcgagtacgcgcttcaagcagaacagcttggcactgctcatgctgtaaaacaggcacagccatttcttgctgacgaaaaaggcgtcacaattgtcatttgcggagatacgccgcttttgacagcagagacgatggaacagatgctgaaagaacatacacaaagagaagcgaaagctacgattttaactgcggttgcagaagatccaaccggatacggccgcattattcgcagcgaaaacggagcggttcaaaaaatcgttgagcataaggacgcctctgaagaagaacgtcttgtaactgagatcaacaccggtacgtattgttttgacaatgaagcactatttcgggctattgatcaggtgtctaatgataatgcccaaggcgagtattatttgccggatgtcatagagattcttaaaaatgaaggcgaaactgttgccgcttaccagactggtaatttccaagaaacgctcggagttaatgatagagttgctctctctcaggcagaacaatttatgaaagagcgcattaataaacggcatatgcaaaatggcgtgacgttgatcgacccgatgaatacgtatatttctcctgacgctgttatcggaagcgatactgtgatttaccctggaactgtgattaaaggtgaggtgcaaatcggagaagatacgattattggccctcatacggagattatgaatagtgccattggcagccgtacggttattaaacaatcggtagtcaatcacagtaaagtggggaatgatgtaaatataggaccttttgctcacatcagacctgattctgtcatcgggaatgaagtgaagatcgggaattttgtagaaattaaaaagactcaattcggagaccgaagcaaggcatctcatctaagctatgtcggcgatgctgaggtaggcactgatgtaaacctgggctgcggttcaattactgtcaattatgatggaaagaataagtatttgacaaaaattgaagatggcgcgtttatcggctgcaattccaacttggttgcccctgtcacagtcggagaaggcgcttatgtggcggcaggttcaactgttacggaagatgtacctggaaaagcacttgctattgccagagcgagacaagtaaataaagacgattatgtgaaaaatattcataaaaaataatcctaaattcggaggtttatccatgtctaatcaatacggagataagaatttaaagattttttctttgaattcgaatccagagcttgcaaaagaaatcgcagatatagttggagttcaattagggaaatgttctgtcacaagatttagtgacggggaagtccaaattaatatcgaagaaagtattcgcggatgtgattgttacatcatccagtctacaagtgaccccgttaacgagcatattatggaactgctgattatggtagatgcgttaaaacgcgcttctgcaaaaacgattaacattgttattccttattacggttatgcgcgtcaagacagaaaagcaagatcccgtgagccaatcacagctaaacttttcgctaacctgcttgaaacagccggtgcgactcgtgtgattgcacttgacctgcatgcgccgcaaattcaaggattctttgatataccgattgaccacttaatgggtgttccgattttaggagaatattttgaaggcaaaaatcttgaagatatcgtcattgtttcacctgaccatggcggtgtgacacgtgcccgcaaactggctgaccgactaaaagcgccaattgcgattattgataaacgccgtccgcgtccaaacgtggcggaagtcatgaatattgtaggtaacatcgaagggaagactgctatcctcatcgatgacattattgatactgcaggtacgattacacttgctgctaatgcgctcgttgaaaacggagcgaaagaagtatatgcatgctgtacacaccctgtactatcaggccctgcggtagaacggattaataattcaacaattaaagagcttgttgtgacaaacagcatcaagcttcctgaagaaaagaaaattgaacgctttaagcagctttcagtcggaccgcttctggcagaagcaattattcgcgttcatgagcagcaatcagtcagctaccttttcagctaaaccgattttgaaaggtttaaacctttatcgttttgggtattgtttgtaataggacaactaaaacgacaataggatggtgctgaatatggcaactttaacggcaaaagaaagaacggactttactcgttcgtctcttcggaatatccgtacttcaggacatgttccaggtatcatatatgggaaggatacgggtaacaaacctgtgtcattagacagtgtggagctcatcaaaacgctgagggacgaaggcaaaaatgcagtcattacgcttgaggtcagcggagaaaaacactcagtcatggtaacagacctgcagacggacccgctgaaaaatgaaatcactcatgctgattttcaagtagttaatatgagtgaggacattgaagtggaagttccgattcatctgaccggagaagccattggagtgaaaaacggaggcgtactgcagcagccgttatatgcacttactgtaaaggccaagccaaaagccattccgcaaacgattgaggctgatatttcaagcctcgatgtaaatgaagtactgacgattgcagatttgcctgctggcggtgactactcctttaatcatgaatcagatgaggttgtggcttcaatccttcctccgcagcagcaggaagcagctgaggtcgatgaagaggaatctgccgatgctcagccagaaggtgaaaacgaacaataatagcttaaggcgtaaccctcccgcggttacgtcttttgtgctagaatgagaagaattatagcccgtttatgaagacgggagttatgtgactaagggaggattcgccatgcttgtgattgccggtctcggaaacccggggaagaactatgaaaacacacggcataatgtcggatttatggtgatagatcagcttgcaaaggaatggaatatagagctgaatcaaaataaatttaacggattatacggaaccggatttgtttccggcaaaaaggttctacttgttaaaccgcttacatatatgaatttatcaggagaatgtttgcggcctttaatggactactatgatgtcgataacgaagatttgacagtcatttacgacgaccttgaccttccgactggcaagatccgtttaagaacgaaaggaagcgccggagggcacaatggcatcaaatcactgatccagcatcttggaacatccgagtttgaccgtatccgcatcggaatcggccggcctgtaaacggcatgaaggtcgttgattatgtgttaggctcctttaccaaggaggaggcacctgagatcgaagaagcggttgataaatctgtgaaggcttgtgaggcttctttgagtaaaccgtttttagaagtcatgaacgaatttaacgcaaaggtataaaatgtaacaacaaagtccatactacaccaaaatgactttttcatcaggaggtcccttgtatggctttgcattattattgtcgtcattgcggagtgaaagtaggcagtctcgaatcttcaatggtatcgacagactcacttggatttcagcacttaacaaatgaggaaagaaacgatatgatttcttataaagaaaatggagatgtccatgttttgacgatatgtgaagactgccaagaggcgcttgaccgaaatccgcattaccacgaatatcacacatttattcaataaaaagctttggtgtagacactagaccaaagcgtttttctgttctcgcaggaaacagagaggaggggccatatggacaacattcaaacctttataaaagaaagcgatgactttaaatccatcatcaacggtttacacgagggcctgaaggaacagctgctcgcgggtctgtcgggttccgcgcgttctgtttttacttctgctctggctaatgaaacgaataagcctatctttctcatcacccataacttatatcaagcccagaaagtaacagatgatctgacttcacttctagaggatcggtctgtccttttgtaccccgtcaatgaactcatttcatcagaaatcgcagttgcaagccctgaattgcgggcgcagcgattagaagtcattaatagactaacgaatggagaagcgccaattgtcgttgctccggtagctgcaatcagaagaatgctgccgcctgttgaggtgtggaaaagcagccagatgctcattcaagtaggccatgatattgaacctgaccagcttgcctcacggctggtagaggtagggtatgagcggtctgatatggtttctgcgcccggggaattcagtattcgcgggggaatcattgacatttatccgttgacttcagagaatccggtgagaattgaactttttgacaccgaggtggattcaatccgcagctttaattcagatgatcagcggtcaattgagacccttacctcgatcaatatcggtcccgcgaaggaattaattatcagaccggaagaaaaagcgcgggcgatggagaaaatcgatagtggtcttgccgcgagcttgaaaaaattaaaggctgacaaacaaaaagaaatacttcatgcgaatatttctcacgataaagaacgcttgtctgaaggccagacagatcaggagctcgtgaagtatctctcatatttctatgaaaagcctgctagtttactagattatacacctgataatacacttctgattttggatgaagtcagtcggattcatgagatggaagaacagcttcaaaaagaagaagcggagtttataacaaatcttcttgaggaagggaagattttgcatgacattcgtttgtcattcagcttccaaaaaatagtggttgagcaaaaacggcctctgctgtactactctttatttttgcggcatgtacaccatacgagcccgcaaaatatcgtcaatgtgtcaggccggcaaatgcagagtttccatggccaaatgaacgtgcttgcgggcgaaatggagcgttttaaaaaatcaaatttcactgttgtgttcttaggagcaaacaaggaacgtacacagaaattgtcatctgttttggctgattatgatatcgaggctgccatgacagacagcaaaaaagcgcttgttcagggacaggtctatatcatggaaggcgagctccaatcgggatttgagctgccgttaatgaagcttgccgttattacggaagaagaactgttcaaaaaccgtgtaaagaagaagccgcgaaaacagaagcttaccaatgcagagcgcatcaaaagctattctgagcttcaaattggagattatgtcgttcatattaatcacgggatcggaaaatacctggggatcgaaactcttgaaatcaacggcattcataaagactatttaaatatacattatcagggcagtgacaagctttacgtccctgtagaacaaattgatcaggtccaaaaatatgttggctccgaaggaaaagagccaaagctgtataaattaggcggaagtgaatggaagcgggtcaagaaaaaagtagagacatccgttcaggatattgctgacgacttaattaagctgtatgccgaaagagaagcgagcaagggctatgcgttttctcctgaccatgagatgcagcgtgaattcgaatcggctttcccttatcaagagactgaggatcagctccgttcgattcacgaaatcaaaaaagacatggaaagagaacgtccgatggaccgcttgctgtgcggagatgtgggctacggtaaaacagaggttgccatacgtgccgcgtttaaggcgatcggtgacggaaagcaggtagctctgctcgttccgacaacaattttggcacagcagcactatgaaaccataaaagagcgcttccaggactatccgattaatatcggccttctcagcaggttcagaacgcgaaaagaagcaaacgaaacaatcaaagggctgaaaaacggaacggttgatatcgtcatcgggacgcatcggctgctatcaaaggatgtcgtgtataaagacttagggctcctcatcattgatgaagagcagcgtttcggtgtaacccataaagaaaagatcaagcaaataaaagccaatgttgatgtattaacgttaacagcaacaccgattccgcgtacgctgcatatgtctatgcttggcgtaagggacctttcagtcatcgagactccgccggaaaatcgcttccccgtacagacgtatgttgtggaatataacggcgctcttgtcagagaggcgattgaacgtgagcttgcacgcggaggccaggtctatttcttgtacaaccgggtagaggacattgagcggaaagcggatgaaatttcaatgctagtccctgacgcgaaggtagcatatgcgcatgggaaaatgacagaaaatgaattagaaaccgttatgctaagttttcttgaaggagaatcagacgttctcgtcagcacaaccattatcgaaactggcgtggacatcccgaacgtcaatacgctgatcgtatttgacgccgacaagatgggactttctcagctttaccagctgcgggggcgtgtcggccgttctaaccgtgtggcgtatgcgtacttcacgtatcgccgggataaagtgctgacagaagtggctgaaaaaaggctgcaggctattaaagaattcacagagctaggttccggttttaaaatcgcaatgcgtgacttaacgattcgcggagctgggaatcttcttggtgcccagcagcatggcttcatcgattcggtcggatttgacctctattcacaaatgctgaaggaggccattgaggagcgtaaaggagacacagcgaagacagagcagtttgaaacagaaattgatgtcgagcttgatgcgtatattccggaaacttatattcaagacggcaaacagaaaattgatatgtataaacgcttcaggtctgtggcgacaatcgaagagatgaatgagcttcaagatgaaatgatcgaccgctttggaaactatccaaaagaagtcgaatacttgtttactgttgcagaaatgaaagtctatgcgagacaggaacgtgtcgagctgattaagcaggataaagatgctgtcagattgacgatttctgaagaagcaagtgctgaaattgacgggcagaagctgtttgagcttggcaatcaatatggcagacaaatcggactgggaatggaagggaaaaaactcaaaatctccatacagacgaaaggccgtagtgctgatgaatggctcgacaccgtgctgggcatgctgaagggcttaaaagatgtgaaaaagcaaaccatttcatcaacgtaaattttgttactctctggtgtatattacatttgatgtgacggatactaatttcaagcgaggcggaaggtacataaagtaactgctttaggtctttcccacatgtatataccatcaaatgaaagagaggcaccagagatgaaagcaaccggtatcgtacgtcgtattgatgacttaggtcgggtcgtgattcctaaagaaattcgaagaactctgagaatcagggaaggcgatccgcttgagatttttgtagatcgtgacggagaagtgattttgaaaaagtactctccgatcagtgagcttggagactttgcaaaggagtatgcagacgcgctttacgacagcctcggccattcagtgctgatttgtgatcgtgatgtgtatattgccgtgtccggcagctccaaaaaagattacttaaacaagtcaatcagcgaaatgctggaaagaacaatggatcagcgcagctccgtgcttgagagtgatgcgaaatcagtacagcttgtgaatggaattgatgaggacatgaattcttatactgtcggcccaattgtggcgaacggtgatccgataggtgctgtggtgatcttttcaaaagatcagacaatgggcgaagtagagcataaagccgttgaaacagcagctggatttttggctcgtcaaatggaacagtaggtcttattcctttcttcgaaaataggtatgtaaagaacagctctccttgggacgctgttctttttcatgcgtgccgaaaaaggaatccaagggttgggatgtggtataataacctcgtttttatttgtgccgcggtaatacgtgaaccgtattgcccctgacgttgggaaggagcttttggatggacgattcaataggcgttaaacggcattggatttggcagggggcttttgttttaattctggcaggcatcatcacaaaaattttaagcgctgtttacagagtcccgtttcaaaacattgtcggcgatgttggattttatatatatcagcaggtatatccctttcttggtattgcggtcatgctgtccacatcaggatttccagtcattatttcaaagctgatgaatgattatagtgaaaaaaatcatcacaccatattaaaaatatcagcgttgtttttgtctttaatcggtattttattatttctttgtttatatctgggtgctgttcctattgcactctttatgggagattcgcatctagccgtgttaattcaagtggccgcatacgcgtttctgctgttcccatttgtcgcgttgcttagaggcggttttcaggggcggcacgaaatgctcccttcagccttatcacagatgacagagcagtttctgcgtgttgcggtgctcttgggtttatcattttggctcgtgaaaaagggagcctcgctttatactgcgggagcggcagccgcttcaggctctcttgccggaagtttggttgcattgataatactgggttttttttggttcaaaacgaaaagagacaaccaaacggataggcaaaacgaaaatgtcatcacaacaaaagaattgacgaaaaaactgcttttatattcggttacaatttgtgtaagcagtttgctgcttttgtttatccagctcgttgatgctttgaatttatatgcattgctttcgggtggtgaggcaagcgaagaagcaaaacgcttaaaggggatctatgatcggggacaacccttgctgcagctcggctcagtttttgccgtaagcattgcgacgtcactcgttccgtatatttctatggctgtaaaaaacaaagagctgaagatcatgaaagaaaaaatcacgtcatctttgaaactatgccttgtgctcggtacaggcgcatcggctgggttgatttgcattcttaagccggttaatatcatgctgtttcaaaatggagaagggacaggtgcgttacaagtatttagctgctccattttgtttgcatccttggcggtaacggcagcggcagtcttacagggagcggggtacacagtttttcctgcgatagcggtgggcgcgggtgttgcagtgaaatgggtgttaaacacacttttggttccgcgctatgggattgaaggcgcatcgcttgcgacagctgcttcctttgcggctgtcgccggccttaacttgtatcagcttcggcaaaaggaatggctcgataagcttagaggcgttttgattccgattattggatctgctcttttgatgtcagctgttttgcttgcgtatacgcgtctctggactttcttgtttcctgcaacaggaagaggagcggctgtgattgagagtctttctgctgttgccattggtggcgcggtgtttatttattgtatgatgagattgggaatatttacagatgaagagctgaacagtgtgccattcggcagcaagttaagcaaattcatgagaaggagagaacaaaatggcgggtaaaattacagtcgtcggacttggtgccggagacatggaccaattgacaattggtatacacaagctgctgacgaaggcagatacgctgtatgtcagaaccaaggatcatcctttaattgaggagcttgaaaaagaaacgaagaacatccgtttctttgatgatatatatgagaaacatgatcagttcgaggcggtatatgaagaaattgcagatatcctctttgaagcggcgcggcgtgaggacgtggtttacgctgtgccgggacacccttttgtcgcagaaaaaacagttcagctgctgacggagcggcaggaaaaggaaaacgttcaagtgaaagtcgcggggggacaaagtttccttgatgccacattcaatgccttgcaaattgacccgattgaaggttttcaatttgtggatgccggcacattgtccgcggatgagcttgagctcagacatcatctgatcatatgtcaggtttacgaccaaatgacggcttctgaagtcaagctgacattgatggagaagctgcctgatgattatgaggtcgtcattgtgactgcagcaggcagccgtggcgaggagatcaggacagtgccattatttgagctggaccgcaatgtcgctttgaacaacttaacaagtgtgtatattccgccgattaaagaagagaagctgctttatcacgaattctccacgttccgaagcatcatcagagagcttcgcggacctaatggatgtccgtgggataaaaagcagacgcatcagtcattaaagcagtacatgattgaagaatgttatgagcttctcgaagctattgacgaagaagacacagaccatatgatcgaagagcttggcgacgttttgcttcaggtcttgcttcacgcgcaaattggtgaagatgaaggttatttcacaattgatgatgtcataaaaggaatcagtgaaaaaatggtccgaagacatccccatgtgtttaaagatgttaaggttcaggatgaaaacgatgttttagccaattgggaagatataaaaaaggccgaaaaaaatacatctgaatcatcattactagacagcgtaccgaaaacccttccagctctttcgaaagcagctaaattgcagaaaaaagcagcgaaggtcggttttgactgggaagacgtcagcgatatttgggaaaaggtaagtgaggaaatgaaggaattttcttctgaggtttctgaagctcctcacgaacacaatcttaaagctgagtttggcgacattttgttcgcgctggtgaatgtagcccgcttctacaaaatagagccagaggaagcgctgaccatgactaatgacaaattccggagacggttctcgtacattgaggaaacagcgaaggaagagggagtcgagttggctgatatgtcccttgaggacatggacaaactgtggaatgaagcaaaagaaactgagaggagatcatagatatgagattagataaatttttgaaagtatcacggctgatcaaacggcgtacactagcgaaggaagtagctgaccaaggacgaatctctattaacggaaaccaagctaaagctagctctgacgtaaaaccgggagatgaactaacggtccgcttcggccaaaagcttgtaacggttcaagttaatgaattgaaagacacgacgaaaaaagaagaagctgcaaacatgtacacgattctaaaagaagaaaaactcggcgaataggcttgttctaaaaaaatcccccacctcatacaatgcagtaataatgctaaaagtatcgaggatatgggggctgaatagatgaattcatattatgatcaaaaaggttcttcgtctgttccggaacagcatgatgtgacaatgaaaggccggaagcatttagatatttctggggttaagcatgtggagagttttgataacgaagaattcctgctggaaacggtgatgggaatgctctccgtcagaggccaaaacctgcagatgaaaaatcttgatgtggaaaaagggattgtttcgattaaaggcagggtatttgatttagtgtacttagacgaacaacaaggggataaagctaaagggttttttagcaagttgtttaaatgacgctgacgacacaattctatacaatgctagcgatgtccggtatgggtctctggcttggtgcttcgcttgatacataccggctctttgtcattcgtgccaaaacagccagatggctattatttattcatgatattcttttctggattgtgcaagggctgcttttcttttatgtcttgcttcatgtaaatgagggagaattcaggatttacatctttttagcggttctgctgggcgttgcgacgtatcagagcctttgcaaacgaatctatataaaaatactgaaattcgtcatttaccttgttgcttctgtttatcaattcttcaaaaaactcattcagcacgtgttatttcgtcctattgtgtggacatgcggagcgatcatctggctggcggcatttttattcaagaaaacatacagcctgataggttttctcctgctgtgtctatataaaatagtcatggttctgtgttttccgatccgttttatcgcgaaacaatgtttgaaacttcttcctgtgaaaatgcgtctaacttttagacgttattttgaaaaaggtgcaggatttctcaaaaagaagaagaaactattgataaccataagaacgaccattacacggtttttgaagaaatgaaaggaggaccgtctggtttgaatttttccagggaacgaacgataactgaaatacaaaacgactataaagaacaagtagaacggcaaaatcagctgaagaaacgaagacgcaaagggctgtacagacggttaactgtattcggcgccctagtattcctgacggcaattgtgctggcaagctctgtatggtcccaaacatcttcccttagtgcaaaagaagaaaagaaagaacagcttgaaaaagaactgaaaagtttaaagacaaaacaaacggatttaaaagaagaaatatccaaattgaaggatgaggattacgtcacagagcttgccagaagggacttattcatgtctggagacggagaaattatcttcaatgtggagaagaagagcaagtagccttgttgacacttaaatttttatttaggtataattaagcaaacgatctttttataagcctaaggaggagcactttttttatgtcgattgaagttggcagcaagttgcaagggaaaattacaggtattacaaattttggagcatttgttgaattgcctggaggctcaaccggtctcgttcacattagtgaggtagctgataattatgtcaaagacattaacgaccacttaaaagtcggcgaccaagttgaagtgaaagtcatcaacgttgaaaaagacgggaaaattggtttatctattaaaaaagctaaagaccgtccgcaagccagacctagaaatgatttccgtccgaaagaatcttttgaacagaaaatgaataagtttttaaaagacagcgaagatcgcttgtcatctttaaaacgcaatacggaatcaaaacgtggagggcgcggagcaagaagaggataacttgctgctttctataaaataaatgaagcatccgttcatcccgacggatgcttttttattatcctcatcctctttaagagtcagaaaattacaacattaaagtttctgttgacgaaagagacaaacctttgtattatataacttgtgcttagaagcacaaaacaatatggcggtgtagctcagctggctagagcgtacggttcatacccgtgaggtcgggggttcgatcccctccgccgctaccatatttgtttggcccgttggtcaagcggttaagacaccgccctttcacggcggtaacacgggttcgaatcccgtacgggtcatcctaaaaaatcggtttctcttgcagaagccgatttttttcatttttagacaacattccggaaattcttttcataaacgaatatcaaggcagaaaccgtcgaagatttctttggtattgttaccttcttttgacaaaatcctatctgtgctttcgctataatgacaggcaacgaatataacaggtgggagatgagaggaatggaaaaagcagaaagaagagtgaacgggccaatggcgggacaagctttggaaaaactccaatcgttttttaacaggggcacgaagctggtgactcatcatttgcattcactgtttttctataaaggattcatttatgttgttatcggatttttgcttggacgggctttcatattatccgaggtgcttcctttcgcacttcctttctttggagcgatgcttctcatcagaagagacaaagcgttttatgcggttttggctgtgcttgcaggtgcgctgaccatatctccaaagcactcattgctcatactggcggcattgctggcattcttcgtattttctaaagtggctgccttcattaccgacgatcgtgttaaagcactcccgattgtcgtgttcttctcgatggctgcagcaagagccgggtttgtttatgcccaaaatggcgtatttacaacctatgattatgtaatggctatcgttgaggctggactgtcgtttatcttaacactgattttccttcagagccttccgatttttactgtgaaaaaagtgaaacaatcattaaaaatagaggaaattatctgctttatgattcttattgcctctgttttaacggggctggctggcttgtcctaccaagggatgcaggcagaacatatattggctcgttatgttgtgttgagtttttcctttattggcggagcaagcatcggctgtacggttggtgttgtgaccggcctgattcttggcttggcgaatatcggaaacctatatcaaatgagtctgcttgctttttccggtttattgggcggtttgctgaaggaaggaaaaaaagcgggtgcagcaatcggtctgatcgttggttcacttcttatatctttatatggtgaaggctctgccggtctgatgacaacgctctatgagtcattaatcgcagtcggcctgtttttgctcacacctcaatctattacaaggaaagtggcgagatatattccgggaactgtcgagcatcttcaagagcaacagcaatacgctagaaaaatccgtgatgtcactgctcagaaggtagaccagttctccaatgtatttcacgcgctgtctgaaagctttgcaaccttttaccaagcgtcagacgaacagacagatgacagcgaagttgatctgttcttaagcaaaatcacggagcattcctgtcagacgtgctacaagaaaaacaggtgctgggtacagaactttgataaaacatatgatttaatgaaacaagttatgcttgaaacagaggaaaaagaatatgcatcaaaccgaaggctaaaaaaagagtttcaacagcattgttctaaatccaagcaggttgaagagctgattgaggatgagctcgcacatcatcatgcccatttgacactcaagaaaaaagtccaagacagcaggcgccttgttgctgaacagcttttaggtgtttctgaggttatggccgacttttctcgggaaataaaaagagagcgagaacagcactttctgcaggaagagcaaatcatagaagcgcttcagcatttcggaattgagattcagcatgtcgagatctatagccttgaacaaggaaatatcgatattgaaatgaccattccgttcagcggacatggagaaagtgaaaaaatcattgcccctatgctgtctgacattctggaagaacaaattcttgtgaaagctgaacagcactctccgcatccgaatggatacagccatgtcgcctttggatcaacaaaatcatacagggtgtccacgggagctgctcacgctgcgaagggcggcggccttgtctccggcgacagctacagcatgatggagcttggagccagaaaatatgctgcagcaatcagtgacggaatgggcaatggcgcaagagcgcactttgaaagcaatgaaacgatcaagcttcttgaaaaaatccttgaatcgggaattgatgaaaaaatagcaattaaaacgatcaacagcatactgtctctaaggacaactgacgaaatatattccacgcttgacctatctattatcgatcttcaagatgccagctgtaaatttttgaaggttggatcgacgcctagctttatcaaacggggtgaccaggtcatgaaagttcaagcgagcaatctgccaatcggtattattaatgaatttgatgtggaggttgtgagtgaacagctgaaagctggtgacctcttaattatgatgagtgatggcatttttgaggggcctaagcatgtggaaaatcacgacttatggatgaagcgtaaaatgaaagggttgaaaacaaatgacccgcaggagattgcagatttgcttatggaagaagtcatccgcacaagatccggccaaattgaggacgatatgactgttgttgttgtccggattgatcacaatacaccgaagtgggcatccattcctgttccggcaatctttcaaaacaaacaagaaatttcataacgcttccgtataaatcaaatttcttctggcgaagatgggaatatatgaatctgagaatcctcgtattctccaggaggaatgaatgtgaacaacggacatttaaatcaaattttgctgataacggatggctgctcaaaccatggggaagacccgcttgcaatggctgcttttgctaaagagcaggggattacggtaaatgtcattggtataatggaagaaaatcaaattgaccctgaggcaatgaaggaagtcgaagggattgcacttgccggaggaggtgtgcaccaagtcgtttatgcatctcagctttcacaaactgttcaaatggtaacaaagaaagcgatgacgcaaaccttacaaggtgtagtcaatcaagaactgaaacagattctcggaaagaatgtggaaatggaagagctttctccggaaaaacgcggcgaagtcatggaagtggtagacgagcttggagaaacggtgcatcttcaggttttggttcttgttgatacaagtgcaagtatggcgccaaagcttccaacagtaaaagaggcgctgattgatttgtctgtaagcctcaattcccgaatcgggaataacgaatttgcgatgtgtatatttcccgggaaaaaacaagaggtcgagcttgtgctgaactggacaccgaagctgcaatctctttccacactctttgcaaagctttcgacaggcggcatcacgccgacaggtccggcgattcgtgaagcgacactgcagtttgaaaaaatacgctcaagaaggggcatgctggcagatgatgaacgacgctttgacgagtttggcatgtagcctcaagccgggtacgacaatcaaaggcaagtggaatggaaacacttatacattgcgtaaacagcttggtaaaggggccaatggaattgtgtatttggcagaagcatcagatggacatgttgccttaaaggtgagtgatgacagcctgtctattacttctgaagtgaatgtcttgaaatctttctcaaaggcccagtccgttacgatggggccttctttttttgatacggatgatgcctatattcccagtaccaatacgaaagtttcattttatgcaatggaatacataaaagggccgctgcttttgaagtatgtcagtgataaaggagcagagtggatacctgtattaatgattcagctgttatccagcttatcggtgcttcaccagcaaggatggatattcggcgatcttaaacctgataatctgatcgtaactggtccgcccgcaaggatccgctgcattgatgtgggcggcacgacaaaggaaggccgggcgataaaagagtatacggagttttatgacagaggctattgggggtatggaacaagaaaggcagagccatcctatgatctgttcgcagttgccatgattatgatcaacagtgtgcataaaaaagaatttaagaaaacgaaccagcccaaagaacagcttaggtctctcatcgaaggaaaccctctgcttcaaaagtataaaaaagtgcttttttcaaccttgaacggagattatcaatccgcagatgaaatgaaaaaggatatgctagacgcggggcaaaaagcagcacaaagaaaacagcctataaaagcatcaccgcagcctgccacacgacatagacagcaaaaaccgcgccaaggaaaaataacgaagacgcgatataccccaaaacagaaaccggctaagtcgggggggttatttgaaacaacgctgatcgtgatcagtgttttagcgctttatttcgcctatattatctttttcttaatctgaatggtgcaaactgcagagcctatgcttcttctttgcttggaggggttgaaagtgttaggatatgaatatctttaaaatacctgctcattgtgaggaggacattgtgaaaagtgtcaaagattttttaaacaaacacaatcttacgttaaaaggggcgacgatcattgtaggcgtttctggcggtccggactcaatggctcttcttcacgcgttgcatacgttatgcggccgttcagcgaatgttattgcagctcacgttgaccatcggttcagaggtgcggaatccgaggaggacatgcgttttgtccaagcttattgtaaagctgaacagctcgtgtgcgaaacggctcaaatcaatgtaaccgcatatgcacaggaaaaaggactcaataagcaggctgcagcacgcgattgccgctaccagttttttgaggaaatcatgtcgaagcaccaagcggactatctggctcttgcgcatcatggtgatgaccaggttgaaacaatgcttatgaaactggctaagggtacgcttggaacgggacttgcgggaatgcagccggttagacgttttgggacggggcggatcatcaggccgttcttaaccattacaaaggaagagatccttcactattgccgtgaaaacggcttgagctaccggacggatgaaagcaacgccaaagatgactacacaagaaacagattcagaagaacagtgctcccgtttttgaagcaggaatctccggatgtgcataaaaggtttcagaaagtgagtgaagcactgacggaagatgagcaattcttacagtcattaacgaaagatgaaatgaataaagtaatcacaagccagtctaatacatcagttgaaatcaattcctctcaattgcttgccctcccgatgcctttacaaagaagaggagttcaactaatattaaactatctttatgaaaacgttccatcatccttttcagcccatcacattcagcagtttctcgattgggcggaaaatggcagtccttcaggagtactggactttccgaaaggactgaaggtggtcaaatcatatcagacatgtttgtttacatttgaacaatggcagtgcaaaaatgttccctttgaataccaaattagcggagcttctgatgaaacggcagtgctccctaatggatatctgatagaggcaaggcattatgcggactcgcctgaagaacatgggaatgctgtttttatcacaagtgaaaaaaaggtgcgatttcccttaacaatccggacgagaaaagctggagaccggatcaaactaaaagggatgaacggctcaaaaaaggtaaaggatatatttattgataagaaactgcctctccaagaaagagacaactggccgattgtgacggacgcaagcggtgaaattatctggatacctggcttgaaaaaatcaatttttgaagatcttgtgattccaaacagcgaccgcattgtattacaatatagacagcatgaaaagtgtagggggcaagcaaaatcatgatgaaacatgatatcgagaaagtactgatctcagaggaagagatacaaaagaaagtaaaagagttaggtgcagaattaacgagcgagtatcaagatacatttccgttggcaatcggtgtgttaaaaggagcacttccttttatggcggatcttatcaagcatattgatacatatttggaaatggatttcatggatgtatcaagctacggaaattctacggtttcttctggagaagtaaaaatcattaaagatttggatacatctgtagagggccgggacatcttaattattgaagatatcatcgacagtgggttaaccttaagttatctcgtagagctcttccgataccgtaaagcaaaatcaattaagattgttacccttttggataaaccgagcggaagaaaagcggacatcaaagcagactttgtcggttttgaagttcctgacgcgtttgtagtgggttacggacttgattatgctgagcgctatcgcaatctgccttatatcggagtgttaaaaccggcagtttatgaaagctgatcggcagcctgcttccgagatggttattgtttgtattggaatgattttctatggtactattgaacatagttgtgcttactgtgggaggaggtaaggaatgaatcgggtcttccgtaataccattttttatttacttattttattagtagtaatcggggttgtgagctacttccagacctcaaatccgaaaacagaaaatatgtcgtacagtacgttcatcaaaaacctggatgacgggaaagttgatagcgtatcggttcagcctgtcagaggtgtttatgaggtaaaagggcagctgaaaaactacgacaaagatcaatactttttgactcatgttcctgaaggaaagggagcagaccagatatttaacgctttgaaaaagacagacgtaaaggttgagcccgcgcaagaaacaagcggatgggtgacgttcctgacgaccatcatcccatttgtcattatctttattctgtttttcttcctgctcaatcaggctcaaggcggcggcagccgtgtcatgaactttggcaagagtaaagcgaagctgtatacagaggaaaagaaacgcgtcaaatttaaagacgttgcaggggcagacgaagaaaagcaagaacttgttgaagttgttgagtttctgaaagatccccgcaagtttgccgagctcggcgccagaataccgaaaggcgtgcttttagtcgggcctccgggtaccggtaaaacattgcttgccaaggcttgtgcgggagaagccggcgtacctttcttcagcatcagcggatctgatttcgttgaaatgtttgtaggggtcggtgcttcccgtgtgcgtgacttgtttgaaaatgcgaaaaagaatgcgccttgtttgatcttcattgatgaaattgacgcagtcggacgccagcgtggcgctggtctcggcggtggacacgatgaacgtgaacagacgctaaaccaattgcttgttgaaatggacggattcagcgctaatgaaggaattatcatcattgctgcgacgaaccgtgcggacatcttggacccagccttacttcgtccgggacgttttgaccgtcaaatcacagtggaccgcccagatgtcattggccgtgaagctgtattgaaagtccatgcgagaaacaaaccgctggatgaaacggttaacctaaaatcaattgccatgagaacaccaggcttctcgggcgctgacttagaaaacctcttgaatgaagctgcgcttgtagcagctcgtcaaaacaagaaaaaaatcgatgcgcgtgatattgacgaagcgacggaccgtgtaattgccggacccgctaagaagagccgcgttatctccaagaaagaacgcaatatcgtggcttatcacgaaggcggacacaccgttatcggtctcgttttagatgaggcagatatggttcataaagtaacgattgttcctcggggccaggctggcggttatgctgttatgctcccaagagaagaccgttatttccaaacaaagccggagctgcttgataaaattgtcggcctcttgggcggacgtgttgctgaagagattatcttcggtgaagtcagcacaggggcgcacaatgacttccagcgtgcgacgaatattgcaagacgaatggttacggaattcggtatgtcagaaaaactgggaccgttgcaatttggacagtctcagggcggtcaggtattcttaggccgtgatttcaacaacgaacagaactacagtgatcaaatcgcttacgaaattgatcaggaaattcagcgcatcatcaaagaatgttatgagcgtgcgaaacaaatcctgactgaaaatcgtgacaagcttgaattgattgcccaaacgcttctgaaagttgaaacacttgacgctgaacaaatcaaacaccttgtcgatcatggaacattacctgagcgtaatttctcagaagatgaaaagaacgatgatgtgaaagtaaacattctgacaaaaacagaagaaaagaaagacgatacgaaagagtaattcgctttctttctaaataaactgccggctgacgctggcagtttttttatgtaaatgatgggctcagctgcggcttttacaatcatccaaatctggtatcgatttgtttacaaatgagccgctgatcgtgtatggtattgtagaatgtttgtaaaagtaaagtagagaaactattcaaaagtggtgatagaggttgttactggttatcgatgtggggaacaccaatactgtacttggtgtatatcatgatggaaaattagaatatcactggcgtatagaaacaagcaggcataaaacagaagatgagtttgggatgattttgcgctccttatttgatcactccgggcttatgtttgaacagatagatggcattattatttcgtcagtagtgccgccaatcatgtttgcgttagaaagaatgtgcacaaaatactttcatatcgagccgcaaattgttggtccaggtatgaaaaccggtttaaatataaaatatgacaatccgaaagaagtgggggcagacagaatcgtaaatgctgtcgctgcgatacacttatacggcaatccattaattgttgtcgatttcggaaccgccacaacgtactgctatattgatgaaaacaaacaatacatgggcggggcgattgcccctgggattacaatttcgacagaggcgctttactcgcgtgcagcaaagcttccgcgtatcgaaatcacccggcccgacaatattatcggaaaaaacactgttagcgcgatgcaatctgggattttatttggctatgtcggccaagtggaaggaatcgttaagcgaatgaaatggcaggcaaaacaggaaccaaaggtcattgcgacaggaggcctggcgccgctcattgcgaacgaatcagattgtatagacatcgttgatccattcttaaccctaaaagggctggaattgatttatgaaagaaaccgcgtaggaagtgtataggaggtttagtaatggattatttagtaaaagcacttgcgtatgacggaaaagttcgggcttatgcggcgagaacgactgatatggtaaatgaggggcagagacgccatggtacgtggccgacagcatccgctgcattgggccgcacaatgacagcttcacttatgctcggcgctatgctgaagggcgatgataagctgaccgtgaaaatcgagggcggaggtccaatcggagctattgtagctgatgccaatgccaaaggagaagtcagagcctatgtctctaacccgcaagttcattttgatttaaatgaacaaggaaagcttgatgtcagacgtgcggttggaacaaacggaacgttaagtgtcgtaaaagatttaggtttgcgcgagttcttcacaggacaagtagaaatcgtttcaggagaattaggagatgatttcacttactatcttgtatcatctgagcaggttccttcatcagtgggcgtaggtgtgctcgtgaatcctgacaataccattcttgcggcagggggctttattattcagctgatgccgggaacagatgatgaaacaatcacaaaaattgaacagcgtctatctcaagtagagccgatttctaagctcatccaaaaagggctgacaccagaagaaattttagaagaagtcctaggcgagaaacctgagattttggaaacgatgcctgtcagattccattgcccttgttcaaaagaacggttcgaaacagccattttaggactaggcaaaaaagaaattcaagatatgatagaagaagatggacaagccgaagcagtatgccatttttgtaatgaaaagtacttatttacaaaagaagagctggaagagcttcgtgaccaaactacccgctaagctctttagcgggtttttaatttgagaaaaggggctgaaagcaggtttgaaatcaagaacaatctggaccattattttaggggcgctgttggtttgctgtattgctgttgcatatacgctgacgaaatcccaagctggcgcatcgtcatccggtgagtctattgcgactatcggaggcaagagtgtgacaagagaagaatggctgaaagaaatggaagatcagtatggtaagtcaacgcttgaagatatgatcaatgtccgagttgttgagcagctggctaaaaagaacaaccttaaaatatccaaaagcgaagttgatcgtgagtttttgctgattaaagcggtcaataattccttttacgaagatgaacatacgacggagaaagagtggaaagaccaaattcgttataatatcctccttgaggaattgttaacaagggatatcgatatctcaaacaaagaattggaatcattctataataaaaataaggaactatatcagtttgatgattcgtatcgaattcggcacattgttgtaaaagatgaagaagaagcgagagaagtcctgaaagaactgaaaggcggatcaagctttgaagctgtcgctgccgaaagatctacagacagatatacatcaccatacggcggagatttaggttttgtcacagaggcatcagacaacattccatcagcatacattgaagaggcgaaaacactcaaagaggatgaatggtctcaggaaccaataaaggtcagcaacggatatgccattatccaactgaaagaaaaactaaaggcaagaacgttctcatttgatgaagtaaagggccagatcagacggcaaatcgcaatggatcagctaggtgataaagcgacagttaagacactttggaaagaagctgatgtatcttggttttatggggaaaaaagtactaagtgattgacaaaaaattttgaaattgatagattatatacataataccaatacaaatagtcggaaattgaggtgtcgagaatggtacgtgtagcaaactccattactgaattaattgggaatacgccaatcgttaaattaaatcgccttgcagatgaaaacagtgcggatgtatatctaaaacttgaatacatgaaccctggaagcagtgtaaaagaccgtatcggtttagccatgattgaagcggctgaaaaagaaggaaaattaaaagccggtgatacaatcattgaaccgacaagcggaaatactggaatcgggcttgcaatggttgctgctgctaaaggattaaaagccattttggttatgcctgatacaatgagcatggagcgccgcaaccttcttcgcgcatacggtgctgagcttgtgctgactcctggtgcggaaggcatgaaaggtgccattaagaaagctgaagagcttgctgaaaagcacggatactttgtgccgcagcagtttaacaacccttctaaccccgaaattcaccgccaaacaacgggtaaagaaatcgttgagcaattcggtgatgaccagcttgacgcatttgtagccggaatcggaacgggcggaacgattacgggagcgggcgaagtgctgaaggaagcatacccttccatcaagatttatgctgttgaaccgtcagattccccagtgctttcaggaggaaaaccaggcccccacaaaattcagggaatcggagcgggattcgtgccggacatcttaaacactgaagtatatgatgaaatcttccctgtgaagaatgaagaagcattcgaatatgcccgcagagctgcacgtgaagaaggaattctcggaggcatctcatcaggtgcggcaatttatgctgctcttcaagtagcaaaaaaactcggaaaaggcaaaaaagtattggccatcattccaagtaacggcgaacgttatctaagcacgccgctgtatcaattcgattaaaaaaagccaaaactcccggtccgccgggagtttttttatatttcgtgcatcaaatatgccatgtctgcgacgaatgttattcttggaagagaaattcacttttttcactaacaacattgctttacaattaaaaacaagtaaaaaagaaaatagaggaatgatacaaatggcacaacgcagaccggcaggcaaaaaaataccttttcaaaaagactcattcttacaacaatttgagaaacttgcgcaatcccggaaacatcatgtacttctcgaaagtgcaagaggcggcagatacagtatagccggtcttgatccaattgcgactgtgaaaggaaaagacggaataactacaattaagcatggtgatgagatgctgtttaaagaaggtgatccattacgggccttccacagctggtttaaaacgctggaaacagaaacaaatcatgagttccctgactttcaaggcggggcaatcgggtttctcagctatgattacgcacggtacattgaaaattttaaaatgctctcattagatgatctagaaacaccagatatttattttcttgtttttgatgatatagcagtttatgaccatcaagaagagtctctatggctgattactcatgttaatggttctgatcaggaaacagcgaatgtgaagctatctgagttagagcagatgtggctgactgagcttcccgctgtctcttcgcgagagatgaaccctgaaacagatggttctttcgcggcgccatttaccgaggatgggttctcgcaagctgtagagaaaatcaaacaatacattgccagcggagatgtgtttcaagtcaatctatcaataaggcagtcacagtcactgtctgcccacccatatcaaatttacaaaaccttgagagaagtaaatccttctccttatatggcgtatttagaaacacctgatttccaaatcatttgcggctcgcctgaactgcttgtcagcaaaaagggcaagctattagagacgagaccgattgcgggcacccgttccagagggaaaacaaatgaagaagacgaggtgcttgcaaacgaattgatacacaatgaaaaagaacgcgcggaacatgtcatgctggttgatcttgagcgaaatgatctgggaagagtatcacggtacgggtctgtgcgcgtaaatgaattcatggcaattgaaaaatactcgcatgtgatgcacattgtgtctaatgtccaaggtgaactgcaggatgggtatgatgctgtagatattattcatgctgtattccccggaggaaccattactggtgcaccgaaagtaagaacgatggaaattatagaagaacttgagccgacacgccgagggctttatactggatctataggatggtttggatataatcacgatctgcagtttaatatcgtcattcgaaccatttatgcaaccggagggcaggcatttatgcagtccggcgcaggagttgtgattgattctgttccgaagcacgaatacaaggaatcattcaaaaaagcttttgcgatgcaaagagcattagagctgagcaaagaagagacaaaaattagatgaggtgagcggagaaatgattttaatgattgataactacgattcattcacgtacaacttggtacagtatttgggcgagcttggggaagagctggttgtgaaacgcaatgacagcatcacaatcgaagaaattgaagaactgtctccggactttctgatgatatctcccggaccgtgcagccctgatgaggcgggaatcagcctcgaagcgattaaacatttcgcagggaaaattcctattttcggtgtatgtctcggacaccagtccatcgcacaagtgttcggtggtgacgttgttagggcagaacggcttatgcacgggaaaacctcggatatcgagcatgacggcaagaccatttttgaagggttgaaaaacccccttgttgcgacgcgataccactcgctgatcgtaaaacctgagacgctgccaagctgttttacagtaacagcacaaacgaaagaaggagaaatcatggctattcgccacaatgacctcccgatagagggcgtgcaatttcacccagagtctattatgacctcctttgggaaagaaatgctcagaaattttattgaaacatatcgcaaggaagttattgcgtgatgatatatgtgaacggccggtatatggaggagaaagatgcagttctttctccttttgaccatgggtttttatatgggatcggtgttttcgaaaccttcaggctctacgaaggctgtccgtttttgcttgattggcatatagaaaggcttgaacgcgcgcttaaggatctgcaaatcgaatatactgtttcaaagcatgagatccttgagatgctggacaagctgcttaagctaaatgatatcaaggatggcaatgcccgcgtcagactgaacatatcagcggggatcagcgataaaggctttgtcgcccagacgtatgataagccgaccgttttatgctttgtgaatcagctgaaaccagaaagccttcctttgcaaaaagaagggaaggttttatcgatacggagaaacactcctgagggatcgttccggttaaaatctcatcattatctaaataatatgtatgcgaaacgggaaattggaaatgatccacgtgtcgagggaattttcctaacggaggatggagctgttgcagagggtatcatatctaatgtcttctggagaaaaggtcgctgtatctatacgccatcgcttgatactggtattctggacggcgtcacgagacgttttatcatagaaaatgcaaagaatatcggcctggagctcaaaacgggccgatatgagccagaagctctcttgacagctgacgaagcgtggatgacgaactcggttcttgaaatcatcccgtttactaaaatagaagaagtaaactatggaagccaaagcggagaagcaacctccgctcttcaattgttatacaaaaaagaaataaagaacatgattcatgaaaagggaggaagagcatggcgcagcacacaatagatcaaacacaagtaatccacactaagcccagcgctttatcatataaagagaagacgctggtgatgggaattttaaacgtaacgcctgactctttctcggacggcggaaaatatgacagcttagacaaggcgctgctgcacgcggaagagatgatcaatgatggtgcccatatcattgatatcggaggggaatcgacaaggcctggcgctgagtgcgtatctgaggatgaggagatgtccagagtcattccggtgattgagcggattacgaaagagcttggtgttcctatttctgtagatacgtacaaggcttctgtcgcagatgaagcagtgaaagccggcgcatccattatcaatgatatttggggtgctaaacatgatccgaagatggcttccgttgcagctgaacataatgttccaattgttctcatgcataaccgccctgaaagaaactacaatgacttattgccggatatgctgtcggacttaatggagagtgtaaaaattgctgttgatgccggagtagacgagaagaacattattcttgatcccggtatcggtttcgcgaaaacctatcacgataacttggcagtgatgaacaaactagagattttcagcgggctggggtatccggttcttctggcaacctcccgaaaaagattcatcggacgtgttctggatcttccgcctgaggagcgggctgagggcacaggcgcgactgtgtgtctcggcattcaaaaaggctgtgacattgtcagggtccatgatgtaaagcaaattgccagaatggcgaaaatgatggacgcgatgctgaataagggaggggtgcaccatggataaagtttatgtagaaggtatggagttttacggatatcacggtgtgttcaaagaagaaaacaaacttggccagcggtttaaagtcgatttaaccgctgagctggatttaagcaaagctggacaaacagacgaccttgagcaaacgatcaactatgctgagctctatcacgtatgtaaagatatcgtggaaggggagcctgtaaaattggtagaaacgctggcggaacgtattgctggcactgttctcgaaaaatttcagcctgttcagcaatgtacggtgaaagtgattaagccagacccgccaattcccggacactataaatcagtagcaattgaaattacgagaaaaaagtcatgaacaacatagcttatattgcacttggatctaatattggagatagagaaacgtatttaaggcaagcagtggcttcactgcatcagcatgctgcggtgacagtcactaaagtgtcgtctatttacgaaactgacccggtcggatacgaagatcaagctcaatttttgaatatggctgttgaaatcaagacatcattgaacccttttgaactccttgaactgacgcagcagatagaaaatgaattaggcagaacaagggaagtaagatgggggccgcggacggcagaccttgacattttgttatttaatcgtgaaaatattgaaacagagcaactaattgttccgcatccgagaatgtatgagcgtttgtttgtccttgcgccgcttgcggaaatttgccagcaggttgaaaaagaggctacaagcgccgaaacagaccaagaaggtgtaagagtatggaagcagaaatctggggtagacgaattcgtgcattcagaaagctgaaaggttatactcaagaaggatttgcaaaagcattaggtatatcagtttctattctcggcgaaattgaacgcggaaaccgattgccgtcagctgccataattcaagatgcagcagatgttttaaatataagtgcggacgaattggcgccgccagaaaaatagaacaaatgaaaggaggagaaaaattgttcaaaatcggagatattcaattgaaaaaccgggttgtgctcgcacctatggctggtgtctgcaactctgcgttcagattgactgtaaaggaattcggagccggattggtatgcgctgaaatggtcagtgacaaagcgatcctttacaacaatgcaagaacaatgggtatgctttatatcgatgaacgtgagaaaccactcagccttcaaattttcggaggaaaaaaggaaacccttgtggaagcggcgaagtttgtagaccaaaacacaactgctgatatcattgacattaacatgggatgtcccgtgccgaagattacaaaatgcgatgcgggagccaaatggcttctcgatcctgataagatttacgaaatggtttctgcagtagtggatgctgttaataaaccagttacagtgaaaatgagaatgggctgggatgaagaccacattttcgcagtgaaaaatgcacaggctgtagaacgtgcgggtggtaaagcagttgcgcttcacggccgtacgagagtgcagatgtacgaaggaacggcaaactgggatatcatcaaagaagtaaaacaatcagtatcgattccggttatcggaaacggcgatgttaagacaccgcaggatgctaagcgtatgctcgatgagacaggagtagacggggtcatgatcggacgcgctgcattgggcaacccgtggatgatttaccgtacggttcagtatcttgaaacaggtgaattaaaagaagagccgcaagtacgcgaaaaaatggccgtatgcaaactgcatcttgaccgcctgattgacttaaaaggtgaaaacgtagcggtaagagaaatgagaaagcacgctgcatggtatctgaaaggcgtgaaaggcaatgcgaacgttcgtaatgaaatcaatcattgcgagacgagagaagagtttgtacagcttttagatgcatttacggttgaagttgaggcaaaagagcttcaaaatgcaaaagtaggataatactcacctctatttgctgctcactgctagttttacgctggcagtttttctgcttttttcatgaaacaatatctgtaatggagtgataacaatgagtcaagaagagcataaccatgaagaattgaatgatcagctgcaagtcagacgcgataaaatgaatcagctgagagataacggcatcgatccattcggcgcacgttttgaaagaactcatcagtctcaagaagttatttcggcatatcaagatctaaccaaagaagagttggaagaaaaagcgattgaagttacaatcgcaggccgcatgatgacaaaacgcggcaaaggaaaagccggctttgcccatcttcaggatttagaaggccaaatccaaatctacgtaagaaaagacagtgtcggtgacgaccaatatgaaatcttcaagtcttctgacctcggtgatcttatcggcgtaaccggaaaagtcttcaaaacaaatgtaggcgaattgtctgttaaagcaacttcctttgaattgctgacaaaagcgcttcgtccgcttcctgacaaataccatggtttaaaagacgttgagcagcgctaccgtcagcgctacctggatcttatcgtaaacccagacagcaaacatacgtttattacacgaagcaagatcattcaagctatgagaagataccttgatgatcatggatacttagaagtagaaacacctacaatgcacagcattcctgggggagcttctgcacgtccgtttatcactcaccacaacgcgttagacattccactctatatgcgtattgctatcgaactgcacctaaaacgtctaattgtcggcggtttagaaaaagtatatgaaatcggccgtgttttccgtaacgaaggtgtctctacacgccataaccctgaatttacaatgattgagttatatgaagcatatgcggactataaagatatcatgagcttaactgaaaaccttgtcgctcatatcgcccaagaagtgcttggcacaactacgattcaatacggggaagagcaaatcgaccttaaaccggagtggaaaagaatccatatggttgacgcagtcaaagaagcgaccggcgttgatttctgggaagaggttactgttgaacaggcgcgtgaatatgcaaaagaacatggagtagaaattaaagactctatgacagtaggccatatcatcaacgaattcttcgaacaaaaaattgaagaaacgcttattcagccaacgtttatttacgggcatcctgtagaaatttctcctcttgctaagaaaaaccctgaggacccgcgttttacagaccgttttgagctgtttatcgttggccgtgaacatgccaacgcgtttacagagctgaatgatcctattgatcaaagagaacgctttgaagcgcaattaaaagagcgtgaagccggtaatgatgaagctcatctaatggatgaagactttgttgaagctctggaatacggtatgccgccaacaggaggtttaggcatcggtatcgaccgtctggttatgctgctgacgaatgccccttctattcgcgatgtgctgttattcccgcaaatgagacaacgctaataaagaagagcggtatcctccatagagaaaggatgccgctctttttaaattccttagtatttcttcaaaaaaactattgcactattatttactaggtggtatattattattcgttgccgctaaacaaggcgataacgaaaaaataacttaaaaaaagttattgacttcactgagtcaacgagttataataataaagtcgcttgaacgaagtgaacaaaatgatctttgaaaactaaacaagacaaaacgtacctgttaattcagtttttaaaaatcgcacagcgatgtgcgtagtcagtcaaactactttatcggagagtttgatcctggctcaggacgaacgctggcggcgtgcctaatacatgcaagtcgagcggacagatgggagcttgctccctgatgttagcggcggacgggtgagtaacacgtgggtaacctgcctgtaagactgggataactccgggaaaccggggctaataccggatggttgtttgaaccgcatggttcaaacataaaaggtggcttcggctaccacttacagatggacccgcggcgcattagctagttggtgaggtaacggctcaccaaggcgacgatgcgtagccgacctgagagggtgatcggccacactgggactgagacacggcccagactcctacgggaggcagcagtagggaatcttccgcaatggacgaaagtctgacggagcaacgccgcgtgagtgatgaaggttttcggatcgtaaagctctgttgttagggaagaacaagtaccgttcgaatagggcggtaccttgacggtacctaaccagaaagccacggctaactacgtgccagcagccgcggtaatacgtaggtggcaagcgttgtccggaattattgggcgtaaagggctcgcaggcggtttcttaagtctgatgtgaaagcccccggctcaaccggggagggtcattggaaactggggaacttgagtgcagaagaggagagtggaattccacgtgtagcggtgaaatgcgtagagatgtggaggaacaccagtggcgaaggcgactctctggtctgtaactgacgctgaggagcgaaagcgtggggagcgaacaggattagataccctggtagtccacgccgtaaacgatgagtgctaagtgttagggggtttccgccccttagtgctgcagctaacgcattaagcactccgcctggggagtacggtcgcaagactgaaactcaaaggaattgacgggggcccgcacaagcggtggagcatgtggtttaattcgaagcaacgcgaagaaccttaccaggtcttgacatcctctgacaatcctagagataggacgtccccttcgggggcagagtgacaggtggtgcatggttgtcgtcagctcgtgtcgtgagatgttgggttaagtcccgcaacgagcgcaacccttgatcttagttgccagcattcagttgggcactctaaggtgactgccggtgacaaaccggaggaaggtggggatgacgtcaaatcatcatgccccttatgacctgggctacacacgtgctacaatggacagaacaaagggcagcgaaaccgcgaggttaagccaatcccacaaatctgttctcagttcggatcgcagtctgcaactcgactgcgtgaagctggaatcgctagtaatcgcggatcagcatgccgcggtgaatacgttcccgggccttgtacacaccgcccgtcacaccacgagagtttgtaacacccgaagtcggtgaggtaaccttttaggagccagccgccgaaggtgggacagatgattggggtgaagtcgtaacaaggtagccgtatcggaaggtgcggctggatcacctcctttctaaggatattatacggaatataagaccttgggtcttataaacagaacgttccctgtcttgtttagttttgaaggatcattccttcgaaacgtgttctttgaaaactagataacagtagacatcacattcaattagtaatacaagatatcacatagtgattctttttaacggttaagttagaaagggcgcacggtggatgccttggcactaggagccgatgaaggacgggacgaacaccgatatgcttcggggagctgtaagcaagctttgatccggagatttccgaatggggaaacccaccactcgtaatggagtggtatccatatctgaattcataggatatgagaaggcagacccggggaactgaaacatctaagtacccggaggaagagaaagcaaatgcgattccctgagtagcggcgagcgaaacgggattagcccaaaccaagaggcttgcctcttggggttgtaggacactctgtacggagttacaaaagaacgaggtagatgaagaggtctggaaaggcccgccataggaggtaacagccctgtagtcaaaacttcgttctctcctgagtggatcctgagtacggcggaacacgtgaaattccgtcggaatccgggaggaccatctcccaaggctaaatactccctagtgaccgatagtgaaccagtaccgtgagggaaaggtgaaaagcaccccggaaggggagtgaaagagatcctgaaaccgtgtgcctacaagtagtcagagcccgttaacgggtgatggcgtgccttttgtagaatgaaccggcgagttacgatcccgtgcaaggttaagcagaagatgcggagccgcagcgaaagcgagtctgaatagggcgcatgagtacgtggtcgtagacccgaaaccaggtgatctacccatgtccagggtgaagttcaggtaacactgaatggaggcccgaacccacgcacgttgaaaagtgcggggatgaggtgtgggtaggggtgaaatgccaatcgaacctggagatagctggttctctccgaaatagctttagggctagcctcaaggtaagagtcttggaggtagagcactgattggactaggggcccctaccgggttaccgaattcagtcaaactccgaatgccaatgacttatccttgggagtcagactgcgagtgataagatccgtagtcgaaagggaaacagcccagaccgccagctaaggtcccaaagtatacgttaagtggaaaaggatgtggagttgcttagacaaccaggatgttggcttagaagcagccaccatttaaagagtgcgtaatagctcactggtcgagtgactctgcgccgaaaatgtaccggggctaaacgtatcaccgaagctgcggactgttcttcgaacagtggtaggagagcgttctaagggctgtgaagccagaccggaaggactggtggagcgcttagaagtgagaatgccggtatgagtagcgaaagaggggtgagaatcccctccaccgaatgcctaaggtttcctgaggaaggctcgtccgctcagggttagtcgggacctaagccgaggccgaaaggcgtaggcgatggacaacaggttgatattcctgtaccacctcctcaccatttgagcaatggggggacgcaggaggatagggtaagcgcggtattggatatccgcgtccaagcagttaggctgggaaataggcaaatccgtttcccataaggctgagctgtgatggcgagcgaaatatagtagcgaagttcctgattccacactgccaagaaaagcctctagcgaggtgagaggtgcccgtaccgcaaaccgacacaggtaggcgaggagagaatcctaaggtgatcgagagaactctcgttaaggaactcggcaaaatgaccccgtaacttcgggagaaggggtgctctgttagggtgcaagcccgagagagccgcagtgaataggcccaggcgactgtttagcaaaaacacaggtctctgcgaagccgtaaggcgaagtataggggctgacgcctgcccggtgctggaaggttaagaggagcgcttagcgtaagcgaaggtgcgaattgaagccccagtaaacggcggccgtaactataacggtcctaaggtagcgaaattccttgtcgggtaagttccgacccgcacgaaaggcgcaacgatctgggcactgtctcaacgagagactcggtgaaattatagtacctgtgaagatgcaggttacccgcgacaggacggaaagaccccgtggagctttactgcagcctgatattgaatgttggtacagcttgtacaggataggtaggagccttggaaaccggagcgccagcttcggtggaggcatcggtgggatactaccctggctgtattgaccttctaacccgccgcccttatcgggcggggagacagtgtcaggtgggcagtttgactggggcggtcgcctcctaaaaggtaacggaggcgcccaaaggttccctcagaatggttggaaatcattcgcagagtgtaaaggcacaagggagcttgactgcgagacctacaagtcgagcagggacgaaagtcgggcttagtgatccggtggttccgcatggaagggccatcgctcaacggataaaagctaccccggggataacaggcttatctcccccaagagtccacatcgacggggaggtttggcacctcgatgtcggctcatcgcatcctggggctgtagtcggtcccaagggttgggctgttcgcccattaaagcggtacgcgagctgggttcagaacgtcgtgagacagttcggtccctatccgtcgcgggcgcaggaaatttgagaggagctgtccttagtacgagaggaccgggatggacgcaccgctggtgtaccagttgttctgccaagggcatcgctgggtagctatgtgcggacgggataagtgctgaaagcatctaagcatgaagcccccctcaagatgagatttcccattccgcaaggaagtaagatccctgaaagatgatcaggttgataggtctgaggtggaagtgtggcgacacatggagctgacagatactaatcgatcgaggacttaaccatatttttgaatgatgtcacatctgttatctagttttgagagaacactctcaatttgtttggtggcgatagcgaagaggtcacacccgttcccataccgaacacggaagttaagctcttcagcgccgatggtagtcggggggttccccctgtgagagtaggacgccgccaagcaattgcacgttagtgcaattatggaggattagctcagctgggagagcatctgccttacaagcagagggtcggcggttcgagcccgtcatcctccaccattatgccggtgtagctcaattggtagagcaactgacttgtaatcagtaggttgggggttcaagtcctcttgccggcaccacttttatatgatataatactcaagtctcttgtagaagagccattagctcagttggtagagcatctgacttttaatcagagggtcgaaggttcgagtccttcatggctcaccattttacgcgggtgtggcggaattggcagacgcgctagacttaggatctagtgtctttatgacgtgggggttcaagtcccttcacccgcattatataggataacagttagaaaaactggacatcctgtctgcggaagtagttcagtggtagaacaccaccttgccaaggtgggggtcgcgggttcgaatcccgtcttccgctccaactataccatccacgccggggtggtggaattggcagacacacaggacttaaaatcctgcggtaggtgactaccgtgccggttcaagtccggccctcggcattatgttttgcgcccgtagctcaattggatagagcgtttgactacggatcaaaaggttaggggttcgactcctctcgggcgcgccatattttttaatagaatagatgggaaatcgggaagtagctcagcttggtagagcacatggtttgggaccatggggtcgcaggttcgaatcctgtcttcccgaccattttttatggggccttagctcagctgggagagcgcctgctttgcacgcaggaggtcagcggttcgatcccgctaggctccaccaaaagttttttaaaaaagttgttgactttgaagaagtgacgttgtataatgataaagttgctttaacaaagcagacaaacaaaatgatctttgaaaactaaacaagacaaaacgtacctgttaattcagtttttaaaaatcgcacagtgatgtgcgtagtcagtcaaactactttatcggagagtttgatcctggctcaggacgaacgctggcggcgtgcctaatacatgcaagtcgagcggacagatgggagcttgctccctgatgttagcggcggacgggtgagtaacacgtgggtaacctgcctgtaagactgggataactccgggaaaccggggctaataccggatggttgtttgaaccgcatggttcaaacataaaaggtggcttcggctaccacttacagatggacccgcggcgcattagctagttggtgaggtaacggctcaccaaggcaacgatgcgtagccgacctgagagggtgatcggccacactgggactgagacacggcccagactcctacgggaggcagcagtagggaatcttccgcaatggacgaaagtctgacggagcaacgccgcgtgagtgatgaaggttttcggatcgtaaagctctgttgttagggaagaacaagtaccgttcgaatagggcggtaccttgacggtacctaaccagaaagccacggctaactacgtgccagcagccgcggtaatacgtaggtggcaagcgttgtccggaattattgggcgtaaagggctcgcaggcggtttcttaagtctgatgtgaaagcccccggctcaaccggggagggtcattggaaactggggaacttgagtgcagaagaggagagtggaattccacgtgtagcggtgaaatgcgtagagatgtggaggaacaccagtggcgaaggcgactctctggtctgtaactgacgctgaggagcgaaagcgtggggagcgaacaggattagataccctggtagtccacgccgtaaacgatgagtgctaagtgttagggggtttccgccccttagtgctgcagctaacgcattaagcactccgcctggggagtacggtcgcaagactgaaactcaaaggaattgacgggggcccgcacaagcggtggagcatgtggtttaattcgaagcaacgcgaagaaccttaccaggtcttgacatcctctgacaatcctagagataggacgtccccttcgggggcagagtgacaggtggtgcatggttgtcgtcagctcgtgtcgtgagatgttgggttaagtcccgcaacgagcgcaacccttgatcttagttgccagcattcagttgggcactctaaggtgactgccggtgacaaaccggaggaaggtggggatgacgtcaaatcatcatgccccttatgacctgggctacacacgtgctacaatggacagaacaaagggcagcgaaaccgcgaggttaagccaatcccacaaatctgttctcagttcggatcgcagtctgcaactcgactgcgtgaagctggaatcgctagtaatcgcggatcagcatgccgcggtgaatacgttcccgggccttgtacacaccgcccgtcacaccacgagagtttgtaacacccgaagtcggtgaggtaaccttttaggagccagccgccgaaggtgggacagatgattggggtgaagtcgtaacaaggtagccgtatcggaaggtgcggctggatcacctcctttctaaggatattatacggaatataagaccttgggtcttataaacagaacgttccctgtcttgtttagttttgaaggatcattccttcgaaacgtgttctttgaaaactagataacagtagacatcacattcaattagtaatacaagatatcacatagtgattctttttaacggttaagttagaaagggcgcacggtggatgccttggcactaggagccgatgaaggacgggacgaacaccgatatgcttcggggagctgtaagcaagctttgatccggagatttccgaatggggaaacccaccactcgtaatggagtggtatccatatctgaattcataggatatgagaaggcagacccggggaactgaaacatctaagtacccggaggaagagaaagcaaatgcgattccctgagtagcggcgagcgaaacgggattagcccaaaccaagaggcttgcctcttggggttgtaggacactctgtacggagttacaaaagaacgaggtagatgaagaggtctggaaaggcccgccataggaggtaacagccctgtagtcaaaacttcgttctctcctgagtggatcctgagtacggcggaacacgtgaaattccgtcggaatccgggaggaccatctcccaaggctaaatactccctagtgaccgatagtgaaccagtaccgtgagggaaaggtgaaaagcaccccggaaggggagtgaaagagatcctgaaaccgtgtgcctacaagtagtcagagcccgttaacgggtgatggcgtgccttttgtagaatgaaccggcgagttacgatcccgtgcaaggttaagcagaagatgcggagccgcagcgaaagcgagtctgaatagggcgcatgagtacgtggtcgtagacccgaaaccaggtgatctacccatgtccagggtgaagttcaggtaacactgaatggaggcccgaacccacgcacgttgaaaagtgcggggatgaggtgtgggtaggggtgaaatgccaatcgaacctggagatagctggttctctccgaaatagctttagggctagcctcaaggtaagagtcttggaggtagagcactgattggactaggggcccctaccgggttaccgaattcagtcaaactccgaatgccaatgacttatccttgggagtcagactgcgagtgataagatccgtagtcgaaagggaaacagcccagaccgccagctaaggtcccaaagtatacgttaagtggaaaaggatgtggagttgcttagacaaccaggatgttggcttagaagcagccaccatttaaagagtgcgtaatagctcactggtcgagtgactctgcgccgaaaatgtaccggggctaaacgtatcaccgaagctgcggactgttcttcgaacagtggtaggagagcgttctaagggctgtgaagccagaccggaaggactggtggagcgcttagaagtgagaatgccggtatgagtagcgaaagaggggtgagaatcccctccaccgaatgcctaaggtttcctgaggaaggctcgtccgctcagggttagtcgggacctaagccgaggccgaaaggcgtaggcgatggacaacaggttgatattcctgtaccacctcctcaccatttgagcaatggggggacgcaggaggatagggtaagcgcggtattggatatccgcgtccaagcagttaggctgggaaataggcaaatccgtttcccataaggctgagctgtgatggcgagcgaaatatagtagcgaagttcctgattccacactgccaagaaaagcctctagcgaggtgagaggtgcccgtaccgcaaaccgacacaggtaggcgaggagagaatcctaaggtgatcgagagaactctcgttaaggaactcggcaaaatgaccccgtaacttcgggagaaggggtgctctgttagggtgcaagcccgagagagccgcagtgaataggcccaggcgactgtttagcaaaaacacaggtctctgcgaagccgtaaggcgaagtataggggctgacgcctgcccggtgctggaaggttaagaggagcgcttagcgtaagcgaaggtgcgaattgaagccccagtaaacggcggccgtaactataacggtcctaaggtagcgaaattccttgtcgggtaagttccgacccgcacgaaaggcgcaacgatctgggcactgtctcaacgagagactcggtgaaattatagtacctgtgaagatgcaggttacccgcgacaggacggaaagaccccgtggagctttactgcagcctgatattgaatgttggtacagcttgtacaggataggtaggagccttggaaaccggagcgccagcttcggtggaggcatcggtgggatactaccctggctgtattgaccttctaacccgccgcccttatcgggcggggagacagtgtcaggtgggcagtttgactggggcggtcgcctcctaaaaggtaacggaggcgcccaaaggttccctcagaatggttggaaatcattcgcagagtgtaaaggcacaagggagcttgactgcgagacctacaagtcgagcagggacgaaagtcgggcttagtgatccggtggttccgcatggaagggccatcgctcaacggataaaagctaccccggggataacaggcttatctcccccaagagtccacatcgacggggaggtttggcacctcgatgtcggctcatcgcatcctggggctgtagtcggtcccaagggttgggctgttcgcccattaaagcggtacgcgagctgggttcagaacgtcgtgagacagttcggtccctatccgtcgcgggcgcaggaaatttgagaggagctgtccttagtacgagaggaccgggatggacgcaccgctggtgtaccagttgttctgccaagggcatcgctgggtagctatgtgcggacgggataagtgctgaaagcatctaagcatgaagcccccctcaagatgagatttcccattccgcaaggaagtaagatccctgaaagatgatcaggttgataggtctgaggtggaagtgtggcgacacatggagctgacagatactaatcgatcgaggacttaaccatatttttgaatgatgtcacatctgttatctagttttgagagaacactctcaatttgtttggtggcgatagcgaagaggtcacacccgttcccataccgaacacggaagttaagctcttcagcgccgatggtagtcgggggtttccccctgtgagagtaggacgccgccaagcaagcttaaacccagctcaatgagctgggttttttgtattttggtttattggtatcataaaattccacttaactgtataatataataactttataccgaattttaaatcagcaatcaggttttgtggaccgggaaaatggaaataatgaaggatagagcgagaaagttgaaaattctcgagaaacggcttatagtaagattaaagtcaaatatagtcaaagtcagtaaaggagggggttgagtgggacataatatttctgacatcattgaacaatatttaaaacgagtgttagatcaaaatggcaaggaaattttagagattaaacgaagtgaaattgcagataaatttcaatgcgttccttcccaaataaattatgtcatcaacaccagatttacaagcgaaagaggatatattgttgagagcaaacgcgggggtggcggttatatcagaatcattaaaattaaaatgaacaatgaagttgtcctgatcaataatattatttctcaaattaatacccatttgtctcaagcagcctctgatgacattattttaaggctattagaagacaaggtaatttcagaaagagaagcaaaaatgatggtcagcgtaatggaccgctcagttttacacattgacttgcctgaacgtgatgaattaagagcgagaatgatgaaggcaatgctgacttctttaaaattaaaataagcgggtgaaaagattgatttgtcaagagtgccacgagagaccagccacttttcactttacaaaggttgttaacggagaaaaaatagaagttcatatttgtgaacaatgtgccaaagaaaatagtgattcatatggtataagtgcaaatcagggtttctctattcataatttactttcgggtttactgaacatggattcttcatttcaaaatgcaggaactcaaatgttcagtcactcggagcaaatatctgcttgtccgaaatgcggaatgacttttcagcaattcagaaaaattggccgttttggatgttctgaatgttacaaaacatttcatagcaacattacacctatcctacgtaaagtgcacagcggaaacactttgcatgcagggaagataccgaaacgaataggcggcaatcttcatgtcagacggcagattgatatgctaaaaaaggaattagaatccttaatccatcaagaagaatttgaaaatgcagctcatgtaagagatcaaattcgttcattagaacaatcactcaaaagtacagatagtgaggaggaacaggagtaatgtcgctaaagcattttattcaggacgcactaagcagttggatgaagcagaaaggacctgaaagtgacattgtactcagcagccgcatacgtttagcaaggaactttgagcatattcggttccctacgcggtattccaatgaagaagcctcatccatcatacagcaatttgaagatcagttttcagagcaagaaattcccggaatcggcaaatttgttttgattagaatgaatgatgcacagcctttagaaaagcgtgtacttgttgaaaaacatctaatcagtcctaatctgacagagtctccttttggcggctgtttgctttctgaaaatgaggaagtaagtgtcatgttaaatgaagaggaccatattagaattcagtgtcttttccctggatttcagcttttagaagcaatgaaagccgcaaaccaggtcgacgactggattgaagaaaaagttgattatgcattcaatgagcaaagaggatacttaaccagctgtcctacaaacgtaggtacaggtttaagggcttcggtcatgatgcatctgccggcactggttttaactaggcaaataaatcgaattataccggcaattaatcaattaggcttagttgttagaggaatttatggggaaggcagcgaagcagtagggaatatctttcaaatttcaaatcagatcacgcttggtaagtcagagcaggatattgtagaggatcttaacagtgttgctgctcagttgattgaacaagaacgatctgcccgagaagcgatttatcaaacttctaaaatcgaacttgaggatcgggtatatcggtcttatggggtcttgtctaattgccggatgatagaatcgaaagaaactgcaaagtgcctttcagatgttcggttaggcatagacctaggcattataaaaggactttcaagcaacatacttaacgaacttatgattttgacgcagccaggatttttacagcaatactcgggaggcgctttgcgtccgaacgaaagggacattcgaagagcggctctcatcagagaacggcttcacttagaaatgaatgggaaacgacaggaggatgaatcgatatgatgtttggaagatttacagaacgagctcaaaaagtactggcgctagcacaggaagaagcacttcggttaggtcataataacattggcactgagcatattttattaggactggtaagagaaggagagggcattgctgctaaagctcttcaagcgcttggactcggttcagataaaattcagaaagaagtagaaagtttgatcgggcgcgggcaggaaatgtctcaaacgattcattatactcctagagctaaaaaagtcattgagctttcaatggatgaggcaagaaaactcggtcattcttatgttggaacagaacatattcttcttggactgattcgtgaaggagaaggtgttgctgcgagagttttgaataatctcggtgtcagcttaaataaagcaagacagcaggtgctccagcttctaggaagtaatgaaacaggatcatcagcggcaggaacaaacagcaatgcgaatacgcctacgcttgacagcttggcaagagacttaactgctattgcgaaggaagacagccttgaccctgtaatcggcagaagcaaggagatccagcgtgtcattgaagtattaagccgcagaacgaaaaacaaccctgttctcattggggaaccaggtgtaggtaaaacggctatcgcagaaggtttggcacagcaaattatcaataatgaagtacccgaaattttgcgtgataaacgtgtgatgacattagacatgggaacagttgttgccggcacaaaatatcgcggagaatttgaggatcgcctgaagaaggtcatggatgaaattcgccaggcaggaaatatcattctattcatcgatgagctccatacattaatcggggcaggcggagcagaaggtgctattgatgcatctaatattttaaaaccttcacttgctcgcggcgaactccaatgtattggtgcaacgactcttgatgagtaccgtaaatatattgaaaaagatgcagcactggaacgccgttttcagccgattcaggttgatcagccatctgtagatgaaagtattcaaattttacaaggtctgcgtgacagatacgaagcccaccaccgcgtttctatcactgatgatgccattgaagctgcggttaagctttctgacagatatatttctgaccgcttccttccggataaagcaattgacttgatcgatgaagcaggttcaaaggtgagactgcgctcatttacaacgcctcctaacttaaaagagcttgagcagaagcttgatgaggttcgtaaagagaaggatgcggcagtgcaaagccaagagtttgaaaaagctgcttccttgcgtgatactgaacaacgcctgcgcgagcaagtagaggatacgaagaaatcatggaaagagaagcaagggcaggaaaactcagaggttactgtggatgatattgcgatggttgtatccagctggaccggtgtgcctgtatctaaaatcgcccaaactgaaactgataagcttctcaatatggaaaacattcttcattcccgcgtcatcggccaggatgaggcagttgtagctgttgcaaaagccgtcagacgtgcgagagcagggttgaaagatcctaaacgcccaatcggctcattcattttcttaggccctacaggtgtaggtaaaacagaacttgcacgagcacttgctgaatccatttttggcgatgaagaatccatgatcagaattgacatgtctgaatacatggaaaaacactcaacttcaagacttgttggttcacctccgggatatgtgggatatgatgaaggcggtcaattgacagagaaagtcagaagaaaaccttactctgtcgtgcttcttgatgagatcgagaaagcgcaccctgatgtcttcaatatccttctgcaagttcttgaagacgggcgattgactgattctaaaggacgcacagtcgatttccgcaataccattctgatcatgacatcaaacgtcggagcaagtgagctgaaacgcaataaatatgtcggctttaacgttcaggatgaaactcaaaatcataaagacatgaaagataaagtgatgggtgaattgaaacgagcgttcagacctgagttcatcaaccgtattgatgaaatcattgtcttccattcacttgagaaaaaacatcttactgaaattgtgtcattaatgtctgatcaattaacgaaacgcctgaaagaacaagatctttctatcgaattgacagatgctgcaaaagcgaaagtcgcggaagagggcgttgacctggaatacggtgcccgtccgttaagaagagcgatccaaaaacatgtcgaggatcgtttatctgaagaactcctcagaggaaatattcataaaggacagcatattgttcttgatgtagaagatggcgaatttgtcgtaaaaacgactgctaaaacgaattaatatagaagacggaaatgaggcatacagcatgtaagtgtatgcctcactttcatatcaagaaatagaacaagggagaggtcttacactatatatggctaaaacaaaatcgaaattcatctgccaatcctgcggctacgagtctccaaaatggatggggaaatgtccgggctgcggtgcttggaatacaatggtggaagaaatgattaaaaaagcaccggccaatcggagagcggctttttctcattctgttcaaactgtacagaaaccttcacctattacatcaatcgaaacatcagaagaaccccgcgtcaaaacccagcttggcgagtttaacagagtactcggcggaggtgtcgttaaaggctccctcgttttaattggcggtgatcctggtatcggaaagtcaacgctattactgcaggtttccgctcaattatcaggctcatcaaacagtgtcctgtatatttcgggagaagaatctgtaaagcaaacgaagctgcgagcagaccgtctcggcattaataatccgtcactgcatgttttatctgaaaccgatatggagtatatttcgtctgctatacaagagatgaatccagcgtttgtcgttgttgactctattcaaacggtttaccaaagcgatattacatcggctccaggcagtgtgtcacaggtcagagaatgtaccgctgagctgatgaaaattgcaaaaacaaaaggtattccgatttttatcgtagggcacgtaacgaaagaagggtctattgcaggtccaagactgttggagcatatggttgacactgttttatattttgaaggagaacgccaccatactttccgtattttgcgggctgtaaaaaaccgtttcggatctacaaacgaaatgggcattttcgaaatgcgggaagaggggctcactgaggttttgaatccttcggaaattttcttagaagaacgctctgctggttccgcaggctcgagtatcactgcctctatggagggcactagaccgattctcgttgaaattcaggcgctcatctcgccaacaagctttggcaacccaaggcgtatggcaacgggaatagaccataacagggtctctctgttaatggctgtgttagaaaaaagagttggactgctgctgcaaaatcaggatgcttatttgaaagtggctggcggcgttaagcttgatgaaccggcaattgatcttgccattgcgattagtatcgcatcaagctttagagacacacctccaaatcctgcagattgttttattggagaagtgggattaaccggagaagtccggcgggtttcaagaattgaacagcgtgtgaaagaagcggcaaagcttggttttaaacgcatgatcatacccgcggcaaatctggatggatggacaaaaccaaaagggattgaggttatcggagtagcaaatattgcagaagcgcttcgtacttcattaggaggataatagatggaaaaagagaaaaaaggggcgaaacacgagttagacctgtcatctatattgcagtttgttgctccgggtacaccgctcagagcggggatggaaaacgtcttgagagcaaatacaggcggtctgattgttgttggatataatgataaagtaaaagaagtggtggacggcggctttcacataaacacggctttttctccggcgcatttatatgagctggctaaaatggatggagcgatcattttaagtgattctggtcaaaagatcctctacgcgaatactcagctgatgccggatgccacaatttcttcatcagaaacaggaatgcggcacagaactgccgaaagagtagctaagcaaactggctgtcttgtaatcgctatttctgaaagaagaaatgtcataacgttatatcaggaaaacatgaagtatacactaaaagacataggatttattttaaccaaggcgaaccaagccattcaaacacttgaaaaatataagacaatcctcgataaaacgattaatgcactgaacgcgttagagtttgaggaacttgttaccttcagtgatgtcttgtctgtcatgcatcgttatgaaatggtactgagaatcaaaaacgaaattaatatgtatatcaaagagctggggacagaagggcatctgatcaaactgcaagtcattgaattgattacggatatggaagaagaggccgctttatttattaaggactatgtaaaagaaaagattaaagatccgtttgttctcttgaaggagctgcaggatatgtccagttatgatctgctggatgattccattgtgtataagcttctcggttaccctgcttctactaatcttgatgattatgtattgccgagaggatacaggctgttaaataagataccgcgtcttccgatgccgattgttgaaaatgttgtagaagcatttggagtcctgccaaggattattgaggcgagtgcagaagaattagatgaagtagagggaatcggtgaagtacgagcccaaaaaatcaaaaaaggattaaaacgcctgcaagagaagcattatttagacagacaactgtgatttcggttaaaaccttatgaatacgggtatattaatgttggtttttgtttattctgatattcgtaggatgcataagactttgtgaaattaaaatgttaaaaaaggaggtgggggtatgttaaaacgaatagttcaggcgttcttcattatttttggcggcgttgttggtatatttttgatacctgaattgtttgtactgttaaatatacaggacatacctttaataacaaacgcatatacgtctgcggcaataggagcaattatcttttttctcatcagtatatggggtacagaatacgttgtgaactgggtgaagtggatagaggattcattgttaaaagcgccggttccagatttgttatttggaagtcttggcttagtttttggacttataattgcttatcttatcgtaaatgttattcctttagacaatataccttaccgcatattcagcacaataattcctgtatttttggctttcttcctcggttatctcggcttccaggtgggctttaagaaaaaggatgaattgatcagcctgttttccatttccgccagaatgcaaaagaaaaaaggaacagctgatgaagaacatgaggttcaagacaagaagctgaaaattttggacactagtgttattattgatgggagaatagcagatatttgtcagactggttttttagagggagttatcgtgattccgcagtttgtccttgaggaattgcagcatattgcagactcttcagatgttttaaaacgaaacagaggacgccgcggtcttgatatcctgaaccgcattcagaaagaattagacattgaagttgaaatttacgaaggcgactttgaagatattcaggaggttgacagcaagctcgtcaaacttgctaagctgacatccggggtcgttgtgacgaatgattttaatttaaataaagtgtgcgagcttcagaaggtagcagtattaaacattaatgaccttgccaatgcggtcaagcctgttgtgcttcctggcgaggaaatgaatgttcaggtcattaaggacgggaaagagcataatcagggagttgcctacttggatgacggtacgatgattgtcgttgaagaaggacgaaattatatcggcaagcatattgatgtactcgtcacaagtgtgctgcagacagcagcgggacgaatgatttttgcgaagcctaagctgttggagaaggcgctgtaaagggagaagaaacaatgagttatgatgtggtgattcctgcagccggacagggaaagcggatgaaggcagggagaaataaactgttcattgatctgaagggagacccggtgatcatacacacgttaagagtgtttgacagccaccggcagtgcgataaaatcattttggtgattaacgagcaggagcgggagcactttcaacacttgctgtccgattacccgttccaaacttcaattgagcttgttgcaggcggagaagagcgtcagcacagtgtgtataaggggctgaaagccgtaaagcaggaaaagattgtccttgtacatgacggtgcccgcccatttataaaacatgaacaaattgacgaactgatcgcagaggcggaacagacaggagcggccatccttgctgttccggtaaaagatacgattaaacgcgttcaagatttacaagtcagtgagacgattgaacgttcaagcttgtgggctgtccaaacgccacaagcttttcgtctttctttattgatgaaggctcacgctgaggccgagcgcaagggatttttagggacggatgacgccagcctcgttgaacagatggagggcggttcggtccgtgttgtagaaggcagctatacaaatattaagctgacgacgccagacgatttgacgtcagctgaagctatcatggaatcagaaagtgggaataaacatgtttagaattggacaaggatttgatgtgcatcaattagtggagggccgtcctctcattattggcggaattgaaatcccgtacgaaaaagggctgcttggccattctgatgcagacgtattgctgcatactgtcgctgacgcctgcctgggagctgtgggtgaaggagacatcggcaagcattttcctgacacagatcccgagttcaaggacgcagattctttcaaattacttcagcatgtctggggaatcgtgaaacagaaggggtatgtccttgggaacattgattgcaccatcatagcgcaaaagccgaagatgctgccgtacatagaagatatgagaaaaagaattgctgaaggccttgaggcagaagtttctcaagtaaatgtaaaagcaacaacgacagaaaagcttggatttacaggccgggcggaaggaatagcggctcaggcgacagtactgatacaaaaaggctaacttgttttgatgccgggtctatttggtggtagaatagattcatacatttttgcctgaggccatacatgacatgaaaggaagtatttgaaaatgggaaacgaagtacgcgtccgttatgcaccgagtccaaccggacatttgcatattggaaatgccagaacggcgctttttaattatttatttgcccgcaatcaaggcggtaagtttatcattcgagttgaggatacagataaaaagcgcaatattgagggcggagaacaaagccagctgaattatctgaagtggctaggtattgactgggatgagagtgtggatgtcggaggagagtacggcccataccgtcagtcagagcgtaacgatatctataaagtgtactatgaagagcttcttgaaaaagggcttgcttataaatgttactgtacggaagaagagcttgaaaaagagcgtgaagaacagattgcccgcggagaaatgcctcgttattccggaaaacacagagacctgactcaggaagaacaggagaaatttatcgctgaaggcagaaaaccaagtattcgtttccgcgtgccggaaggaaaaatcatcgccttcaatgatatcgtaaaaggcgaaatttcttttgaatcagatggcatcggcgactttgttattgtgaaaaaggacggtacgccgacttacaacttcgcggtagcgattgatgactacttaatgaaaatgacacacgtgctgcgcggtgaggatcatatttctaacacaccgaaacagattatgatttatcaagcattcggatgggatattcctcagttcggacacatgacgctgatcgtaaacgaaagccgtaaaaagctcagtaaacgtgatgaatccattattcaattcatcgagcagtacaaagagcttggctacctgccagaagcactgttcaactttatcggcctgttaggctggtcaccggttggagaagaagagcttttcacaaaagagcagtttattgaaatttttgatgtaaatcgtttatctaaatcaccagctttgtttgatatgcataagctaaaatgggttaacaaccaatatgtgaagaagctggatcttgatcaggttgttgaattgacgcttccgcatttgcaaaaagccggcaaagttggcactgagctttctgctgaagaacaagaatgggttcgtaaactgatttccctgtatcatgagcaattaagctacggtgcggaaattgttgagctgactgatttgttctttacggatgagatcgagtataatcaagaagcgaaagctgttctggaagaagaacaggttcctgaagtgctcagtacattcgcagcgaagcttgaagagcttgaggagttcactccggataacatcaaagcatcgatcaaagcagtgcagaaagaaactggccataaagggaaaaaactgtttatgccgattcgtgttgctgtaacagggcaaactcatggtccggaactgccgcaatcaattgaattgatcggtaaagagactgcaattcagcgtttaaagaatatctaaataaatgattgttgacagggaagagtataaagctttaggccattacagaaaggatctccattggctgagagagatccatgagccgggttttagaagtgcgcccttaagacctttgaagaacgttttttgaaatcagtattcaaaggcggccgccgccgttacaggctgaagttgggagagcagaagtctgcttttcaaacagagtggaaccgcgcggttaaagcgtctctgtcatgtttacatgcagaggcgctttttttattgggtagaggaaatcagatagagaaacggggggaagcatgtgttttttagaatgctcaaagaagacattgatactgtgttcgatcaagatcccgcagcaagaagctattttgaagtgattttaacttattccggtttacatgctatatgggcgcatcggattgcacatgctttatataaacgaaaattttatttccttgcacgccttatatctcaagtaagccgattttttaccgggatagaaatccaccccggcgccacaatcgggagaagatttttcatagaccacggcatgggggttgtcattggggagacatgtgaaatcgggaataacgttaccgtttttcagggggttaccctcgggggaacggggaaagaaaagggaaaaaggcacccaacgattaaagatgacgcattgatagccacaggtgctaaagtgctcggttctattacggtcggtgaaggctcaaagattggggctggttcagtagtgctgcatgatgttcctgatttttcaacagttgtcggtatccctggacgggtcgttgtacaaaatggcaagaaagtaagacgcgatttaaaccatcaggatttgcccgatccggttgctgaccgctttaagtctttggaacagcagattttagagctgaaggcagaacttgaagacagaaaagaaaggatcaaccaaaaatgacaatcacactttataatacattgactagacagaaggaaacattcgttcctcttgaagagggaaaagtgaaaatgtatgtatgcggacccacggtttacaattacattcatatcgggaacgcgcgtccggcaatcgtttacgatacggttcgaaactatttagagtataaaggctatgatgtgcagtatgtctctaacttcacagacgtagacgataaactaattaaagcggcaaatgaactcggtgaggatgtacccaccatttcagagcgttttattaaagcatactttgaagacgtaggtgcgctcggctgccgaaaagccgaccttcatccgcgagtaatggagaacatggatgccattatcgaattcgtagatcagctcgtgaaaaagggctacgcatatgaatcagaaggtgacgtatatttcaaaaccagagcgtttgaagggtacggaaagctttctcagcaatcaatcgatgaacttagatcaggtgcacgcatccgagtcggcgagaaaaaagaagatgctcttgatttcgcactgtggaaagcggcaaaagaaggagaaatctcttgggatagcccttgggggaaaggacgtccgggctggcacattgaatgctcagcaatggtgaaaaagtatctcggtgaccagattgatatccatgcgggcggacaggatttaacattccctcaccatgaaaacgaaattgcgcaatctgaggcgctaacaggcaaaacgtttgcgaagtattggcttcataatggttatatcaatattgataatgaaaaaatgtcaaaatcactaggcaactttgtgcttgtgcatgacatcattaaacagcatgatccgcagcttttgagattctttatgctatctgttcattatcgccatccgattaactattcagaagagcttctggagaatacgaaaagcgcgttcaaccgtttaaaaacagcgtacagcaatcttcagcaccgtctgaacagcagtacgaatttaaccgaagatgacgatcaatggcttgaaaaagttgaagaacaccgcaaagcattcgaagaagcgatggacgatgattttaatacggcgaatgccatttcagtcttgtttgacttagcgaaacacgccaattattatcttcagaaagatcatacggctgatcatgtgattacggcgtttattgagatgtttgaccgcattgtttctgtcctcggtttttcgttgggtgagcaggaacttctcgatcaagagattgaagacttaatcgaaaagcgaaatgaagcgcgccggaatcgcgattttgcattgtcagaccagatccgcgaccagctgaaaagcatgaatatcattcttgaagatacggctcaaggcactcgctggaaacggggagaataacagatgcttgaatttgatacgataaaagattctaagcagcttaacggtcttgcgcttgcttatataggtgatgccatttttgaagtgtatgtcaggcatcacctgcttaagcagggctttaccaaaccaaatgatcttcataagaaatcaagccggattgtttcagcaaagtcacaggctgagatcctattttttctgcagaatcaatcattttttacggaagaagaggaagcggtgctgaaaagaggcagaaatgccaagtcagggacaacacctaaaaatacagatgttcagacgtaccgctacagtacagcatttgaagcgcttctgggctacctttttctagagaaaaaagaggaacgacttagtcagctcgtagccgaagctatacaattcgggacgtcagggaggaaaacaaatgagtcagcaacatgattacgtcatagggaaaaatgcagtgatcgagacgttaaaatctgatcggaagctgtataagctgtggatggcggaaaacaccgtaaagggacaagcacagcaagtgattgagcttgccaaaaagcagggaatcacgattcaatacgtcccgagaaaaaaactcgatcaaatggtgacaggacagcatcagggcgtagtggcacaggttgcagcgtatgaatatgcagaactggacgatttatataaagcagccgaagaaaaaaatgaacagcctttcttcctcattctggacgagcttgaagaccctcataatcttggttccattatgaggacagcagatgcggtcggcgctcatggcatcgtcattccaaaacggagagctgtcgggctgacaacaacagtggcaaaagcttcaacaggagcaattgagcacattcctgtagcaagagtcaccaatttggcacggacgttagaagagatgaaagagcggggaatctgggttgtcggaacggatgcgtccgcgcgtgaggattaccgtaatatggacggcaatatgcctttggctctagtcatcggaagtgaaggaaaagggatgggccgccttgtgaaagaaaagtgcgattttctcattaaactcccgatggccggaaaggtaacttcactaaatgcatctgtcgcggctggtcttttgatgtatgaagtctaccggaaacgaaaccctctgggagaataaagacccatggatatcctgttagtagacgggtacaacatgattggagcctggccgcagctgaaggatttaaaagcgaacagttttgaagaggcgagagacgtactgattcagaaaatggcggaatatcaatcgtatacaggaaacagggttattgttgtttttgacgcgcatctcgtaaaagggcttgagaaaaaacagaccaaccatagagttgaagtaatttttacaaaagaaaatgagacggctgatgagcggatagaaaagctcgctcaggctttgaataatattgcgactcaaattcacgttgcgacctctgactatactgagcagtgggcgattttcggacagggggcattgcggaaatcggcccgggagcttttgagagaggtagaaacgattgaaaggcgaatagagagacgggtaagaaaaatcacttccgaaaagccggcgggtaaaattgctttatcggaagaggttttgaaaacgtttgaaaagtggaggcggggagacttagattaagttgacgcttttttgcccaatactgtataatatttctatctacgtgcgccggggggatcggagtgaatctacagaacaacaagggaaaattcaacaaagagcagttttgccagttggaggacgagcaggtcattgaaaaggttcatgttggggacagtgatgcgttagattacttgattacgaagtaccgaaactttgttcgggcaaaagcaagatcctatttcttaataggggcggacagagaggatattgttcaggaaggcatgataggcctctataagtctattcgtgacttcaaagaggacaagcttacctcattcaaagctttcgcagaattatgtattacccgccaaattattaccgcaataaagacagctactcgccagaaacacattcctttgaattcctacgtctcattagataaaccgatttttgatgaagaatcagaccgaacgctgctggatgtcatttcaggagcgaaaaccttaaatcctgaggaaatgatcattaatcaggaagaatttgatgatattgaaatgaaaatgggagaactattaagtgatttagagagaaaagtactcgtcttatatctcgacgggagaagttaccaagagatttctgatgaactgaaccgacatgtgaaatcgatcgacaatgcccttcagcgtgtgaaacgcaagctggagaagtacttggaaattcgcgaaatcagtttgtaataggaatttatgctatattgacagtatttttctgactatgatatgttactaaagataagaactaatgtctatttagaaaaaggtgtaatgacatgagaaaaaagattacgttagcatgcaagacatgcggaaaccgtaattatacgacaatgaagagctctgcatcagcggctgagcgattagaagtaaagaaatactgcagtacttgcaattcacatacagctcatcttgaaacaaaatagtttttgcgcttttaaattgtggaggtcttttacatgcgtattatgaaattctttaaagatgttgggaaagaaatgaaaaaggtaagctggcctaaaggaaaagagttaacgcgttataccattacggtaatttcaacagttatcttttttgttatcttttttgccctccttgacacaggaatttctcaattaattcgtttaatagttgaataatgatcagcaatacgtgctataatagatcataatattacttgccaaaacccgttcagcgggttttttattgtggcttaaaatgaaagttatcataggcttgccgcctattttttgaagcgttatggtaattcactaaaaccaaatgcggggagggaaggactggacagtcctgaatagaatggaaaagaattggtatgttgttcacacgtactctggttatgagaataaagtaaaagccaacttggaaaagcgtgttgaatcaatggggatgcaggataaaattttccgtgtagtcgtacccgaagaagaagaaacggatatcaaaaacggcaagaaaaaagtcgtgaaaaagaaagtattccctggttatgtgcttgttgaaattgtaatgacagacgactcttggtatgtcgtccgcaacacgccgggcgttactggattcgtaggatctgccgggtcaggttcaaaaccgacgccgcttcttccgggggaagcagaaaccattctgaagagaatgggcatggatgaacgaaaaactgatattgactttgaactgaaagagacagtgaaagtgatagacggaccttttgctaactttacaggatcaattgaagagattgattatgataaaagcaaggtcaaagttttcgttaatatgtttggccgtgaaacgccggttgagctggaatttacccaaatcgataaattgtaatgtgaaaaaacttgaaattgctatatataaatgataatatagcaaaggtacgtcttggacttatccaaggcaactagcatgatatttcgtcattcatataaagaatgaaaccttgagtgggagggtttaccctattaccacatcacggacttaaggaggtgtgtctcgtggctaaaaaagtagttaaagttgtaaaattgcaaattcctgctggaaaagctaacccagcaccaccagttggacctgcacttggtcaagccggtgttaacatcatgggattctgtaaggagtttaacgctcgtacagctgaccaagctggtttaatcattcctgttgaaatttcggtttacgaagaccgttcatttacatttattacaaaaactccacctgctgcagtattgcttaaaaaagcagctggaattgagtctggttctggtgaaccaaaccgtaataaagtggcaaccgttaagcgcgataaagtacgcgaaatcgctgaaacgaaaatgcctgacttaaacgcagcagacgttgaagcggcaatgcgcatggttgaaggtactgcccgcagtatgggtattgtaatcgaggattaatttgtttcttgtcgggttgcgagttttaacaagttcgcaacccttattcgtgggaggttattccgctataaccacataaggaggaaattttaaaatggctaaaaaaggtaaaaagtacgttgaagctgctaagcttgtagaccgttctaaagcttacgacgtctctgaagcagtagctctcgttaaaaaaacaaacacagctaaattcgacgctacagttgaagtggctttccgtttaggggttgaccctcgtaaaaacgaccagcaaatccgtggagcagttgtgcttccaaacggaactggtaaaactcagcgcgttctcgttttcgcaaaaggcgaaaaagcgaaagaagctgaagctgctggtgcagatttcgtaggcgatactgactacatcaacaaaattcaacaaggctggttcgatttcgatgtaatcgtagctacacctgacatgatgggtgaagttggtaaaatcggtcgtgtacttggaccaaaaggtttaatgccaaaccctaaaactggtacagttactttcgaagttgaaaaagctatcggcgaaatcaaagctggtaaagttgaataccgcgttgataaagctggaaacattcatgttcctatcggtaaagtttctttcgaggatgaaaaacttgttgagaacttcacaacaatgtacgatacaatccttaaagctaaacctgctgcagctaaaggcgtttacgtgaaaaacgttgctgtaacttctactatgggacctggtgtcaaagtagactcttcaacttttaacgtaaaataatattgacatgacatcaacattctgatattattcaaaatgttgtaaaatagaatatcatttataccgtagacagtaggggcctaaccgcttaattatcctaccgaggtgtatattatcacagctattacgttacgtatgcttgtatatacagcctccatgtctcatggaggctttttatatggaatccgtcgtctcagtcgtgatcacctaacggtataagtgttacacaagaatctacaggaggtgtaaccatgagcagcgcaattgaaacaaaaaaagttgttgttgaagaaattgcttctaaactgaaagaaagtaaatcaacgatcatcgttgactatcgcggacttaacgtttctgaagtaactgaacttcgtaaacagcttcgcgaagctaacgttgagttcaaagtttacaaaaatacgatgactcgccgtgcggttgaacaagctgagcttaatggtttgaatgatttcttaactggaccgaacgcgatcgcattcagcactgaagatgttgtcgctccggctaaagttcttaatgacttcgctaaaaatcacgaagctcttgaaatcaaagctggcgttatcgaaggtaaagtttctactgttgaagaagtgaaagctcttgctgaacttccatcacgcgaaggcttgctttctatgttgcttagcgtacttcaagctccagttcgcaaccttgctcttgctgcaaaagctgtggcagaacaaaaggaagaacaaggcgcttaatctaatcagtttttcataaattaaaacaaaatggaggaattacaaatggctttaaatatcgaagaaatcattgcttccgttaaagaagcaactgtacttgaattgaacgacctagtaaaagcaatcgaagaagaatttggcgtaactgctgctgctcctgtagctgtagctggcggagctgctgctggcggagctgctgaagagcaaagcgaattcgatcttatccttgctggtgcaggatctcaaaaaatcaaagttatcaaagttgtacgtgaaatcactggtcttggcttgaaagaagctaaagaacttgttgacaacactccaaaaccacttaaagaaggtattgctaaagaagaagctgaagagcttaaagctaaacttgaagaagttggcgcttctgtagaagttaagtaatcttcacttacctgtaggggaagctcgcttttatgaggcgagctttttctttgccattctttaagccatgaaaaaaggaggttctaataatgagtgagcactattattcagaaaaaccttcagtaaaaagcaacaagcaaacctggtcttttaggcttcggaataaagatttcacgtttaccagcgacagcggggttttttctaaaaaagaagttgatttcggctcccgcctgctgattgattcttttgaagagcctgaggttgagggcagctttttggatgtaggctgcgggtacggcccgattggtttatcgctggccagcgactttaaagaccggactatccacatgattgacgttaatgagagagccgtagaactatcaaatgaaaatgcggaacataacggaataacaaacgttaagatttatcaaagtgatttgttttcaaacgttgattctgctcaaacatttgcttctattcttacaaatcccccaatccgagccggaaaaaaagttgtccatgctatctttgagaaaagcgctgaacacttaaaagcttcaggtgaattgtggatcgtcatacagaaaaagcaaggcgcgccttctgccattgaaaagctcgaggaactgttcgatgaagtttccgtcgttcaaaaaaagaaaggctattatatcataaaagcaaaaaaagtttgactcggtattttaactatgttaatattgtaaaatgccaatgtatatattttgcttgatatgatgaattgtcaatatctatgtataaattatacaagtatggaaatgctaataaaatcggtatttgtttttggatgtggttttcttaattagaaacccttttttcttttgtcttgtaaaagtattttctttctttggaagaaatgcttattacacatataatacgcatgatttgaggggtgaatcagttgacaggtcaactagttcagtatggacgacaccgccagcgcagaagctatgctcgcattagcgaagtgttagaattaccaaatctcattgaaattcaaacctcttcttatcagtggtttcttgatgagggtcttagagagatgtttcaagacatatcaccaattgaggatttcactggtaacctctctcttgagttcattgattatagtttaggtgagcctaaatatcctgtagaggaatcaaaagaacgtgatgtgacttactcagctccgctaagagtgaaggttcgtttaattaacaaagaaactggagaggtaaaagaccaagatgtcttcatgggtgatttccctattatgacagatacaggtacttttatcattaacggtgcggaacgtgttatcgtttcccagcttgttcggtctccaagtgtatatttcagtggtaaagtagacaaaaacggtaaaaaaggttttaccgcaactgtcattccaaaccgtggcgcatggttagaatacgaaactgatgcgaaagatgttgtttatgtccgcattgatcgcacacgtaagttgccggttacggttcttttgcgtgctctcggcttcggctccgatcaagagattcttgatctcataggagaaaacgaatacctgcgaaatacgcttgataaagataacacagaaaacagcgacaaagcgttgctggaaatttacgagcgtctccgtcctggagagccgcctacagtagaaaatgcgaaaagcttgcttgattctcgtttctttgatccgaaacgatacgatcttgccaatgtaggacgctataaaattaataaaaaacttcatattaagaatcgcctcttcaatcagagacttgctgaaacgcttgttgatcctgaaacaggagaaatccttgctgaaaaaggccagattcttgatagaagaacgcttgataaagtactgccatacttagaaaacggaatcggttttagaaagctgtatccgaatggcggcgttgttgaagatgaagtgactcttcaatcaattaaaatctttgctccgactgatcaagaaggagaacaggttatcaatgtaatcggcaatgcttacatcgaagaagagattaaaaacatcacgcctgctgatattatttcttcaatcagctacttcttcaacctgctgcacggagtaggcgacacagatgatatcgatcatcttggaaaccgccgtttacgttctgtaggcgagcttctccagaaccaattccgtatcggtttaagccgtatggagcgtgtggttcgtgagagaatgtcaattcaagatacgaatacaattacgcctcagcagctgatcaatattcgtcctgttattgcgtccattaaagagttctttggaagctcacagctttctcaattcatggatcagacgaacccgcttgctgaattaacgcacaagcgtcgtctgtcagcattaggaccgggcggattgacacgtgagcgtgccggaatggaagtgcgtgacgttcactactcccactatggccgtatgtgtccgattgaaacgcctgagggcccgaacatcggtttgatcaactcactatcatcttatgcaaaagtaaaccgttttggctttattgaaacgccatatcgccgcgttgaccctgaaacagggaaggtaacgggcagaatcgattacttaactgctgatgaagaggataactatgttgtcgctcaagcgaatgctcgtcttgatgacgaaggcgcctttattgatgacagcatcgtagctcgtttccgcggggagaacaccgttgtttccagaaatcgtgtagactacatggatgtatcgcctaagcaggttgtatctgctgcgacagcatgtatcccgttcttagaaaacgatgactccaaccgtgccctcatgggagcgaacatgcagcgtcaggctgtgcctttgatgcagccggaagcgccatttgttggaactggtatggaatacgtatcaggaaaagactctggtgccgctgttatttgtaaacaccctggtatcgttgaacgcgtagaagccaaaaacgtttgggttcgccgttatgaagaagtagacggtcaaaaagtaaaaggaaacctggataaatacagcctgctgaaatttgtccgctctaaccaaggtacgtgctacaaccagcgtccgatcgtaagtgtcggcgatgaagtggtaaaaggagaaatccttgctgacggtccttctatggagcttggtgaacttgcacttggccgtaacgtaatggtcggcttcatgacgtgggatggctacaactatgaggatgccatcatcatgagtgaacgcctagtgaaggatgatgtttatacatctatccacattgaagaatacgaatcagaagcacgtgatacgaaacttggacctgaagaaatcactcgcgatattccaaacgtcggtgaagatgcgcttcgcaatcttgatgaccgcggaatcatccgtattggggcagaagtaaaagacggagatcttcttgttggtaaagtaacgcctaaaggcgtaactgaactgactgccgaagaacgccttcttcacgccatctttggcgagaaagcccgcgaggttcgtgatacttctcttcgtgtgcctcatggcggcggcggaattatccatgacgttaaagtcttcaaccgtgaagacggagacgaacttcctccaggtgttaaccagttagtacgcgtatatatcgttcagaaacgtaagatttctgaaggggataaaatggccggtcgtcacggtaacaaaggtgttatctctaagattcttcctgaagaggatatgccttaccttcctgacggcacaccaattgatatcatgcttaacccgctgggcgtaccatcacgtatgaacatcgggcaggtattggaacttcacatgggtatggccgctcgttaccttggcattcacattgcatctcctgtatttgacggagcgcgagaagaggatgtctgggaaacacttgaagaagccggcatgtctcgtgacgccaaaacagtgctttacgacggacgtactggagagccgtttgataaccgtgtatctgtcggtatcatgtacatgatcaaactggctcacatggttgacgataaacttcatgcacgctctacaggtccttactcacttgttacgcagcagcctcttggcggtaaagcgcaatttggcggacagcgttttggtgagatggaggtttgggcacttgaagcttacggtgcggcttatactcttcaagaaattctgactgttaagtctgatgacgtggttggacgtgtgaaaacatacgaagccatcgttaaaggcgacaatgttcctgaaccaggtgttccggaatcattcaaagtattaatcaaagaacttcaaagcttaggtatggatgtcaaaatcctttctggtgatgaagaagaaatagaaatgagagatttagaagacgaagaagatgcgaaacaagctgacggcctggcattatcaggtgatgaagagccggaagaaacagcatctgcagacgttgaacgcgatgtagtaacaaaagaataatctctagttataaaggcaagtgacatcggttaatccgaagataaaaagggaggtaggccccttgctagatgtgaacaattttgagtatatgaacatcggtcttgcttcaccagataaaatccgttcatggtcttttggtgaagtgaaaaagcctgaaacgataaactatcgtacgttaaaacctgaaaaggacggtctattctgcgaacgcattttcggaccgactaaggactgggaatgtcattgcgggaagtacaagcgagttcgttataaaggcgtagtttgtgaccgctgcggagtcgaagtaacacgggctaaagtccgtcgtgagagaatggggcacattgaactggctgccccagtttcccacatttggtatttcaaaggtattccaagccgtatgggtcttgtgctggatatgtcacctcgtgctttagaagaagtcatttactttgcttcttacgttgtaactgatccggcgaatacaccgcttgaaaagaaacagcttctgtctgagaaagaatatcgtgcttatcttgataaatacggtaataaattccaagcatctatgggtgctgaagcaattcataaacttcttcaagatattgatcttgtaaaagaagttgatatgttaaaagaagagctgaaaacttcacaaggacaacgccgtactcgtgcgatcaaacgtcttgaagttttagaagccttccgtaactcaggaaacaagccttcttggatgatccttgatgtgcttcctgttattcctccggagcttagaccgatggttcagctagatggcggtcgttttgcgacttctgatttgaatgacctttatcgtcgtgtcatcaaccgtaacaatcgtttgaaacgccttttggaccttggtgcgcctagcatcatcgttcaaaacgaaaagcgtatgcttcaagaggctgtcgatgccctaattgacaacggccgccgcggacgccctgtaacaggtcctggtaacagaccgttaaaatctctttctcacatgctgaaagggaagcaaggccgtttccgtcaaaaccttcttggtaaacgtgttgattactccggacgttctgtaatcgttgttggtcctcatttgaaaatgtaccaatgcggattaccgaaggaaatggcgcttgaacttttcaaacctttcgttatgaaagaacttgttgaaaaaggtcttgctcacaacattaagagtgcgaaacgcaaaattgagcgcgtacagcctgaagtttgggatgtactagaatcagttattaaggagcatccggtactgctgaaccgtgcccctacacttcacagattaggtatccaggcgtttgaaccaacgcttgttgaaggacgcgcaatccgtcttcacccgctcgtatgtacagcttacaacgctgactttgacggtgaccaaatggcggttcacgtaccattatctgctgaagcacaagctgaagcacgcatcttgatgcttgctgctcaaaacatcttgaaccctaaagatggtaaaccggttgtaacaccgtctcaggatatggtactaggtaactattacctgacacttgagcgtgccggtgctgtcggtgaaggtatggtcttcaagaatacagacgaagcgcttcttgcttatcaaaacggatatgttcaccttcatacgagagtagctgttgcagctaactcacttaagaatgtgacatttaccgaagaacagcgctcaaaattgttaattacaactgtcggtaagcttgtcttcaatgaaattcttccggaatcattcccttacatgaatgaaccaacgaagagcaacattgaagagaaaacaccagaccgtttcttcttagaaaaaggtgctgatgttaaagctgttatcgcacagcagccaatcaatgcgccgtttaaaaaaggcattctgggtaaaatcatcgcggaaatctttaaacgattccatattacggaaacgtctaaaatgcttgaccgcatgaaaaacctaggtttcaaatattcaactaaagctggtattacagttggggtttctgacatcgtcgtactcgatgataaacaagaaattcttgaggaagcgcaaagcaaagttgacaacgttatgaagcaattccgccgcggtcttatcactgaagaagaacgctatgagagagtcatctctatctggagtgctgcaaaagacgttatccaaggcaaactgatgaaatcacttgatgaactcaacccgatctacatgatgagtgactctggtgcccgtggtaacgcatctaactttacgcagcttgccggaatgcgcggcctgatggccaacccggctggacgtatcattgagttgccgatcaaatcaagtttccgtgaaggtctgacagtattggagtactttatctccacacacggtgcgcgtaaaggtcttgccgataccgctcttaaaactgctgactcaggttaccttacacgccgtctcgttgacgttgctcaggatgttatcatccgtgaaactgattgcggaactgaccgaggcattcttgctaagcctcttaaagaaggaactgaaacaattgagcgcttagaagaacgcttaatcggacgttttgcaagaaaacaagtgaagcaccctgaaacaggtgaagtgcttgtgaatgaaaacgaactgatcgatgaagataaagcactggagattgtcgaagccggcattgaagaagtgtggatccgttctgccttcacatgtaatacgcctcatggtgtatgtaaacgatgctatggccgaaatcttgcaactggctccgatgttgaagtcggtgaagctgtcggaatcattgctgcccaatcaatcggtgagcctggtacacagttaacaatgcgtacattccatacaggcggggttgccggagatgacatcacacagggtcttccgcgtatccaagagcttttcgaagcgcgtaatccgaaaggtcaggcaacaattacagaaatcgacggtacagtcgttgagatcaatgaagttcgtgataagcaacaggaaattgtggttcaaggcgcagtggaaacacgttcttatacggcaccttacaactcccgcctgaaagtagcggaaggagataaaattactcgaggccaagtactgacagaaggttcaatcgatccgaaagaacttcttaaagtgactgacctgacgactgttcaagagtatcttctccatgaggttcaaaaggtttaccgtatgcagggtgttgaaatcggtgataaacacgtagaagtaatggttcgccagatgcttcgtaaagtacgcgtgattgatgccggtgacactgatgtgcttccaggtacattgcttgatattcaccaatttactgaagcgaacaaaaaggtattgcttgaaggcaatcgacctgctacaggccgtcctgtcttactcggtattacaaaagcatctcttgaaactgattcattcttatctgctgcttccttccaggaaacaacacgtgtccttacagatgcagcgatcaaaggtaagcgtgacgagcttctcggcttgaaagagaatgttatcatcggtaagcttgttccagctggtacaggaatgatgaaataccgtaaagtaaaaccagtatcaaatgttcagccgactgacgatatggtcccggttgaataactgatttaactctgctgaaagactgcaaaaacagtctttcagcagatatatttatgaaaaagtcactctatgagaagaacgaatctaaaaaatgtcataccttgttgacattcgtctcctagaatgataatataaccaaggtgctcgaaataaacctgttactttggaggatatgtttatgtcttatgataaagtatcacaggccaaatcaattattattggtacgaagcaaacagtgaaagctctaaagcgaggttcagtaaaggaagtagtcgttgcaaaagacgcagatccgatactcacgtcaagtgttgtttcacttgctgaagatcaaggtatctctgtctcaatggttgaatccatgaaaaagctcggcaaagcctgcggaattgaggtaggagcagccgctgttgccattattttataacgtacttttgtttttgcgtaagattccatcttgtgtaaagacattgttttttgccttttgatgaaccacctgggtatgtgggttataaaacgtaatgaagggaggaaaaattcatgcctacaattaatcagctaattcgcaaaggacgcgtgagtaaagtagaaaactcaaagtctcctgcacttaacaaaggatacaacagctttaaaaaagagcacactaacgtatcttctccacaaaaacgcggggtatgtactcgtgttggtacaatgacaccgaaaaaaccgaactcagcacttcgtaaatatgctcgtgttcgtttgactaacggaatcgaggttactgcttacattcctggtatcggtcacaacctacaagagcacagtgttgtacttatccgcggcggacgtgtaaaagacttaccaggggtacgttaccacatcgttcgtggtgcgcttgatactgctggagttgaaaaccgtgcacaaggccgttctaaatacggtacgaaaaaacctaaagcaaaataatatacgaaaatacgcataattgatgaagggaggatattcagatgccacgtaaaggtcctgtagcaaaaagagatgttttacctgatccgatttacaactctaagcttgtatctcgtttaatcaacaaaatgatgatcgatggtaaaaaaggtaagtctcaaacaatcctatacaagtcattcgatatcattaaagaacgtactggcaatgatgcaatggaggttttcgaacaagcattgaaaaacatcatgcctgtacttgaagtaaaagcacgccgtgtaggtggtgcgaactaccaagttcctgtagaagttcgtcctgaacgtcgtacgactcttggacttcgctggttagttaactacgctcgtcttcgcggagaaaaaacgatggaagagcgtttagctaacgaaatccttgacgcagctaacaacactggtgctgctgttaagaaacgtgaagacactcataagatggctgaagcaaacaaagcatttgctcactatcgctggtaggatttatagattaacaaaacacaatttcctaataaggaaggagaaattacccaatggcaagagagttctccttagaaaaaactcgtaatatcggtatcatggctcacatcgatgccggtaaaacgactactacagaacgtatcttgttctatactggtcgtatccacaaaattggtgaaactcatgaaggagcttcacaaatggactggatggagcaggaacaagaacgtggtatcacaatcacttccgctgcgacaactgcacagtggaaaggataccgcgtaaacatcatcgatactccaggacacgtagacttcacagttgaagttgaacgttctcttcgtgtacttgatggtgctgttgctgtacttgacgcgcaatcaggcgttgagcctcaaacagaaactgtttggcgtcaggcaacaacttatggagtaccgcgtatcgtttttgttaacaaaatggacaaaatcggtgcagacttcctttactctgtaggaactttaagagaccgtcttcaagcaaacgctcatgcaattcaattgccgatcggtgctgaagataacttcgaaggtatcattgaccttgtagaaaacgttgcgtatttctacgaagatgacctcggaactcgttctgatgcaaaagaaatccctgaagagtacaaagagcaagccgaagagcttcgcaacagccttattgaagctgtatgtgagcttgatgaagagcttatggataagtaccttgagggtgaagaaatcacaattgacgagttaaaagcaggaattcgtaaaggtacattaaatgttgaattctaccctgttcttgttggttctgccttcaaaaacaaaggtgttcaactagtacttgatgctgttcttgactaccttcctgcaccaactgacgttgctgcaatcaaaggtacacgtcctgatacaaatgaagagattgagcgtcattcttctgacgaagagccattctctgcattagcatttaaagttatgactgacccttacgttggtaagttgacgttcttccgtgtgtactctggaacacttgattctggttcatacgtgaaaaactctactaaaggcaaacgtgagcgtgttggacgtattcttcaaatgcacgctaacagccgtgaagaaatctctactgtatacgcaggggatatcgcagctgctgtaggtctaaaagatacaactactggagatactctatgtgatgagaaggatcttgttatccttgagtcaatggaattcccagaaccagttatcgacgttgctattgagcctaaatcaaaagctgaccaagataaaatgggtatcgctttagcgaaacttgctgaagaagatcctacattccgtactcaaacaaacccagaaactggccaaacgatcatctctggtatgggtgaacttcaccttgatatcattgttgaccgtatgaaacgcgaatttaaagtagaagccaatgttggtgctcctcaagttgcgtaccgtgaaacattccgtaccggtgctaaagttgaaggtaaattcgtacgtcagtctggtggacgcggtcagttcggacacgtttggatcgaattcgaaccaaacgaagaaggcgctggctttgaatttgaaaatgcgattgtcggtggggttgttcctcgtgaatacatcccagctgttcaagcaggtctggaagatgcacttgaaaatggtgtactagcaggcttcccgcttatcgacattaaagctaaacttttcgacggttcttaccatgatgttgactcaaacgaaatggcatttaaagttgctgcttctatggcattgaaaaatgcagtcagcaaatgtaacccagttcttcttgaaccaatcatgaaagtagaagtggttattccagaagaatacatgggagatatcatgggtgatattacttcacgtcgcggacgcgtagaaggtatggaagcacgcggtaacgctcaagttgttcgcgctatggttcctcttgctgaaatgttcggttacgctactgcacttcgttctaatacgcaaggtcgcggtacgttcactatgcacatggatcactacgaagaagtgccgaagagcgtcgcagaagaaattatcaaaaaaaataaaggcgaataattgattttgccgcttaactcaagtataactactattgtaagatgaggaagtgaaagctttctttcacttcctatcactctatacattactaattaaaagctcttaaggaggattttagaatggctaaagaaaaattcgaccgttccaaatcacatgccaatattggtacaattggacacgttgaccatggtaaaacaactttaactgctgctatcacaacagtacttcataagaaatctggtaaaggtacagctatggcgtacgatcaaattgatggtgctccagaagaacgcgagcgcggtatcacaatctctactgcacacgttgagtacgaaactgaaactcgtcactatgcacacgttgactgcccaggacacgctgactatgttaaaaacatgatcactggtgctgcgcaaatggacggagctatccttgtagtatctgctgctgatggcccaatgccacaaactcgtgagcacatccttctttctaaaaacgttggtgtaccatacatcgttgtattcttaaacaaatgcgacatggtagacgacgaagagcttcttgaactagttgaaatggaagttcgcgatcttcttagcgaatacgacttccctggtgatgatgtaccagttgttaaaggttctgctcttaaagctcttgaaggagacgctgagtgggaagctaaaatcttcgaacttatggatgcggttgatgagtacatcccaactccagaacgcgacactgaaaaaccattcatgatgccagttgaggacgtattctcaatcactggtcgtggtacagttgctactggccgtgtagaacgcggacaagttaaagtcggtgacgaagttgaaatcatcggtcttcaagaagagaacaagaaaacaactgttacaggtgttgaaatgttccgtaagcttcttgattacgctgaagctggtgacaacattggtgcccttcttcgcggtgtatctcgtgaagaaatccaacgtggtcaagtacttgctaaaccaggtacaatcactccacacagcaaattcaaagctgaagtttacgttctttctaaagaagagggtggacgtcatactccattcttctctaactaccgtcctcagttctacttccgtacaactgacgtaactggtatcatccatcttccagaaggcgtagaaatggttatgcctggagataacactgaaatgaacgttgaacttatttctacaatcgctatcgaagaaggaactcgtttctctattcgtgaaggcggacgtactgttggttcaggcgttgtttctacaatcactgagtaatagtatgattttaaacgagacccctgcgggtctcgttttttgtttgcttatctttttcttgtataataggatctatcatattcgaggggttaatatttatgattcctgaaaagaaatcaatcgcaatcatgaaagaactaagcattggaaatacaaagcaaatgctgatgattaatggagttgacgtggaaaatccattgttgctttttttacatggcgggccgggaacgccgcaaatcggatatgttagacattatcaaaaagagctggaactgtattttacagtagttcattgggatcagagaggatcggggctttcttattctaagcgaatttcgcatcactctatgacaataaatcacttcattaaagatacaatccaagtcactcaatggcttttagctcatttttcaaaatcaaaactttacctagccggtcattcttgggggtcaatactggcgcttcatgttttgcagcagtgtcctgatttattttacgcgtattatggaatcagccaggttgttaaccctcatgatgaagaatcaactgcttatcaacatattcgtgaaatttctgaatcaaaaaatgccagcttattatctttcctcacacgtttcattggtgctccgccttggaagcaggatatccagcaccttatctatcggttttgtgtcgagctaagcaggggaggcttcactcgccgtcatcgtcaatctctagctgtattatttcaaatgcttactggcaatgagtatggagtgcggaacatgcacagcttcctcaatggattgcgcttcagtaaaaaacatttaactggtgagttgtaccggtttaatgcttttacatcagttccttctattaaagtaccgtgtgttttcatttcagggaaacatgacttaattgttcctgctgaaatatcgaaacagtattatcaagagcttgaggcacccgaaaagcgctggtttcaatttgagaactcagctcacaccccgcatattgaggagccggcattattcgcgaacacattaagtcgacatgcacgacaccatttatgatagatccttgataaataagaaaaacccctgtataataaaaaaagtgtgcaaaccatgcatattttaaataagtcttgcaacatgcgcctattttctgtataatggtgtatgttggtctttgactgcgatgaagtgagaggttgctgacacacccggccgctttgccatggcaaggtgttcaggtttttctcacggagaactgtctaacgtgatgtaggcgaaaaggagggaaaataatggcaaaacaaaaaattcgtattcgtttgaaagcatatgatcatagaatccttgatcaatctgcagagaagattgttgaaacggcaaaacgttctggtgccagcgtatctggtccgattccgttgccaactgaaaaatcagtttacacaatccttcgtgcggtgcacaaatacaaagattctcgtgagcaatttgaaatgcgtacacataaacgtttaatcgacattgtgaacccaacaccacaaactgttgatgctcttatgcgattagacttaccatctggtgtcgatatcgaaattaaactttaattctaaaatatagaatgatcttaataggaggtgtgacgaatgaccaaaggaatcttaggaagaaaaattggtatgacgcaagtattcgctgagaatggtgatcttattccggtaactgttatcgaggctgctccaaacgttgttcttcaaaagaaaacagctgaaaacgacggttacgaagcaatccagcttggttttgacgacaagcgtgaaaagctttctaacaaacctgaaaaagggcacgttgcaaaagcggaaactgctcctaagcgcttcgttaaagaattacgcggagtggaaatggatgcgtatgaagttggtcaggaagtcaaggttgaaattttctctgctggagaaatcgtagatgtaacaggagtatctaaaggtaaaggtttccaaggtgcgatcaagcgccacggacaatctcgcggacctatgtctcacggttcacgctaccaccgtcgtcctggttcaatgggacctgtagatcctaaccgtgtattcaaaggtaaattattacctggacgtatgggcggagagcaaatcactgttcaaaaccttgaaatcgtaaaagttgatgcagaacgcaatcttcttttgatcaaaggtaacgtacctggtgcgaagaaatctttaatcactgttaaaagtgctgttaaatctaaataattctcttaggaaaggaggaaattgattatgccaaaagtagcattatacaaccaaaacggttctactgctggtgacatcgaattaaacgcttctgtatttggtatcgaaccaaatgagagtgttgtattcgacgctattcttatgcaaagagcttccttacgtcaaggaactcacaaagtaaaaaatcgttctgaagtacgcggcggaggtcgtaaaccatggcgtcaaaaaggtactggacgtgcccgtcaaggttcaatccgttcaccgcaatggcgcggaggtggtgtcgtattcggcccaacaccacgcagctattcttataaattacctaaaaaagttcgccgcttggcaatcaaatcagtattgtcttctaaagtgatcgacaacaacatcatcgttcttgaagatcttactcttgatacggctaaaacaaaagaaatggcagctatccttaaaggattatctgttgagaaaaaagctttaatcgtaactgcggatgcaaacgaagcagtagctttatctgctcgtaacattcctggagttactgttgttgaagctaacggaatcaacgttttagacgttgtcaaccacgagaagcttctgattacaaaagcagcggttgaaaaagtagaggaggtgcttgcataatgaaagatcctcgtgatgttctaaagcgccccgtcattactgaacgttctgctgatttaatgactgaaaagaaatatacttttgaagttgatgtaagagctaacaaaacagaagtgaaagacgcggttgaaagcatctttggagtgaaagttgacaaagtcaacatcatgaactacaaaggtaaatcaaaacgtgttggacgctacactggtatgactagccgtcgcagaaaagcgatcgtaaaacttactgcagacagcaaagaaatcgaaatttttgaagcttaattatctgtaaaaagaaggagggaaattcaaaatggcgattaaaaagtataaaccgacctctaatggacgtcgtggcatgacaacttcagattttgctgaaatcacgactgacaagccggaaaaatccttgcttgctccccttcacaaaaaaggcggacgtaacaaccaaggtaaattgactgtacgtcaccaaggtggcggacataaacgccaataccgtgttatcgacttcaaacgcgataaagatggtatacctggacgcgttgctacagttgaatacgatccaaaccgttcagctaacatcgctctaatcaactatgcagacggagaaaaacgttacattcttgctcctaaaggaattcaagtaggtactgaaatcatgtcaggtcctgaagctgacattaaagtaggtaatgcacttccacttatcaacatccctgttggtacagttgtgcataacattgaattaaaacctggtaaaggcggacagcttgtacgttcagctggtacatctgctcaggttcttggtaaagaaggtaaatacgttcttgtacgtcttaactctggtgaagttcgcatgatcctttctgcttgccgtgcttctatcggtcaagtaggtaacgaacagcacgaacttatcaacattggtaaagctggacgttctcgctggaaaggcatccgtcctacagttcgtggttctgtaatgaaccctaacgatcacccacacggtggtggtgaaggacgtgcgccaatcggacgtaaatcaccaatgtctccatggggcaaacctactcttggattcaagactcgtaagaaaaagaacaaatccgataaatttatcgtacgtcgtcgtaaaaataaataacggggttgtctacggttcttttcggaccgtagtgcaatcacgaagggaggttccaaaatggctcgcagcttaaaaaaaggaccatttgtcgatggacacttgatgactaaaatcgagaaattaaatgaaacagacaagaaacaagtcgtaaaaacttggtctcgtcgttctactattttcccacagtttattggtcacacaatcgcagtctatgacggacgtaaacacgtgcctgtattcatctctgaagatatggtagggcacaagttgggtgaattcgctccaactcgtacgtacaaaggtcatgctagtgatgacaaaaaaacaagacgctaagagaggaggcttttaaatgcaagctaaagctgttgcaagaacagtccgtattgctcctcgtaaagcacgtctagtaatggacctgattcgaggcaagcaagtaggtgaggcagtatcaatcttgaaccttacaccaagagctgcttctccaattatcgagaaagtattaaaatccgctattgcaaatgctgagcataactatgaaatggacgctaacaacctggttatttctcaagcattcgttgacgaaggccctacgttaaaaagattccgcccacgtgctatgggacgtgcgagccaaatcaacaaacgtacgagccacattacaatcgttgtatcagaaaagaaggagggataagtagtgggtcaaaaggtaaatccagtcggtcttcgtatcggagtcattcgtgattgggaatctaagtggtacgctggtaaagattacgctgacttcctgcacgaagatttaaaaattcgtgaatacattagcaaacgcctttctgacgcttctgtttctaaagtagaaatcgagcgtgcagcaaaccgcgttaacattacgatccacacagctaagcctggtatggttatcggtaaaggcggttctgaagtcgaagcacttcgcaaagcccttaacagccttactggcaagcgtgtacacattaacattcttgaaatcaaaagagcagatcttgatgcacagctagttgctgacaacatcgctcgtcaattagaaaaccgtgtttctttccgccgtgcgcagaaacaacaaatccaacgtactatgcgtgctggagcacaaggtgtgaaaacaatggtttctggtcgtcttggcggtgcagatatcgctcgttctgaatactacagtgaaggaactgttccattgcacacattacgtgcggacattgactatgcaacatctgaagctgatactacttacggtaagcttggtgtaaaagtctggatctatcgtggagaggttcttcctactaagaagaaaactgaggaaggaggaaaataatatgttattaccaaaacgcgttaaatatcgcagagagcatcgcggaaaaatgcgtggccgtgcgaaaggcggtactgaagtacatttcggagaattcggtatccaagctcttgaagcttcttggattactaaccgtcaaatcgaagctgcacgtattgcgatgactcgttacatgaaacgtggcggtaaagtttggatcaaaattttcccttctaaaccttacactgctaaaccacttgaggtacgtatgggatccggtaaaggggctccagaaggttgggtagctgttgtaaaaccgggcaaagttttatttgaaatttctggtgtgtctgaagaggttgctcgtgaagcgcttcgccttgcatctcacaaattgccaattaaaacgaagttcgtaaaacgtgaagaaattggtggtgaatcaaatgaaagctaatgaaattcgtgaccttaccactgctgaaattgaacaaaaagtaaagtctcttaaagaagaacttttcaatcttcgctttcaattagcgacaggacaacttgaaaatactgctcgcattcgtgaagtgcgcaaagctatcgcgcgcatgaaaactgtgattcgtgaaagagaaattgctgctaataaataatcactgaggggaggtcgtgagcatgagcgaacgtaaccaacgcaaagtttaccaaggccgtgttgtttctgacaaaatggataaaaccattactgttgttgttgagacatacaaaaaacatacactttacggtaaacgcgtaaaatactcaaaaaaattcaaagcacatgatgaaaataatcaagctaaaatcggtgacatcgttaagatcatggaaactcgtccattgtctgcaactaagcgtttccgtctagttgaagttgtcgaagaagctgttattatctaataaagttcggaattctttttccgaagggaggtaacaaataatgattcaacaagagactcgtttaaaagtagctgacaactctggcgcacgtgaagtacttactattaaagttcttggtggttctggacgtaaaacagctaacattggtgatgtaattgtttgcacggttaaacaagcaacaccaggaggcgttgtcaaaaaaggtgaagtcgtaaaagctgttatcgttcgcactaaaagcggagcgcgcagaagtgacggttcatacatcagcttcgatgagaatgcatgtgttatcatccgtgacgacaagagcccacgcggaactcgtatcttcggaccagttgctcgtgaattgcgtgaaaacaactttatgaaaattgtttctctagctccagaagttatctaatgaaataaatgccttactcaaggaggtgcgatcaggatgcatgtaaaaaaaggcgataaagttatggttatctctggtaaagataaaggcaaacaaggaacaatccttgctgctttccctaaaaaggaccgcgttttagttgaaggtgttaacatggtaaagaaacactctaaaccaactcaagctaaccctcaaggcggtatttctaatcaagaggcgccaattcatgtatcaaacgttatgccgctcgatcctaaaacaggtgaagtgactcgcgtaggatacaaagtggaagatggcaaaaaagttcgtgtagcaaaaaaatctgggcaagttctagataaatagtattaaaaggaagggaggtctatctcatgaaccgccttaaagaaaagtacaataaagaaattgcacctgctttaatgactaagttcaattatgattcagtcatgcaagtgcctaaaatcgaaaaaatcgtaatcaacatgggtgttggtgacgctgttcaaaacgccaaagcaatcgacagtgctgttgaagaattaacgtttatcgcaggtcaaaaacctgtcgttactcgtgcgaagaaatcaattgctggattccgtcttcgtgagggaatgcctatcggtgcgaaagtaactcttcgcggagagcgcatgtatgatttccttgataaacttatttctgtatctttaccgcgtgtacgtgacttccgcggggtttctaaaaaatctttcgacggtcgcggtaactacacacttggtatcaaagaacagttaatcttccctgaaattgactacgataaagtaacaaaggttcgcggaatggacatcgttatcgtaacaactgctaatactgacgaagaagctcgtgagctattaactcaagtaggtatgccgttccagaaataatcaatgaaagggaggcgaaatcgtggctaaaaagtctatgattgcgaaacaacaacgtacaccaaagtttaaagtacaagagtacacacgctgtgaacgctgcggacgtccgcattcagtcattcgtaaatttaaactttgccgtatttgtttccgtgagcttgcatataaaggacaaattcctggcgtgaaaaaagccagctggtaatccccaagaaagggaaggaggtaattatataatggttatgacagatccaattgcagatatgctaactcgtattcgcaatgcaaacatggtacgtcatgagaagcttgaaattcctgcttctaaattgaaaagagaaattgctgaaattttaaagcgtgaaggtttcattcgtgacgttgagttcgtagaagacagcaaacaaggtatcatccgcgttttcttgaaatacggacaaaacaacgagcgcgttatcactggtcttaaaagaatcagcaagcctggtttgcgtgtttatgctaaatctaatgaagtaccccgcgtacttaacggtcttggaatcgcgattatttctacatcacaaggtgttttaacggacaaagaagcccgtgcaaaacaagctggtggagaagttctagcatacgtttggtaagaagtttaacatgaatggaggtgtttggtatgtctcgtgtaggtaagaagctacttgagattccttctgatgttacagtaacgttaaatgataacaacactgtagctgtgaaaggaccaaaaggagaattaactcgtacgtttcaccctgatatggagattaaagtagaggacaatgtgcttacagtcgctcgtccttctgatcaaaaagagcaccgtgccctgcatggtacgactcgcagtctgcttggcaacatggttgaaggtgtatctaaaggatttgaaagaggtttggaattagtcggtgtcggttaccgtgcttctaaatccggaaataaacttgttttaaacgttggatactctcatcctgttgagatcgttcctgaagaaggcatcgaaatcgaagttccttctcaaacaaaagtagttgtaaaaggtacagacaaagaacgcgtaggagctattgctgctaacatccgcgctgtacgttctccagagccttacaaaggtaaaggaatccgctacgaaggtgaagttgttcgccgtaaagaaggtaaatctgctaagtaagatcgcttaaagtgaagaaaggagtgacctagatgattacgaaaactagcaaaaatgctgctcgtcttaaaagacacgctcgtgttcgcgctaaactttccggtactgctgaaagaccgcgcctgaacgttttccgttctaacaagcacatttacgctcaaatcatcgatgatgtaaatggtgtaacacttgctagtgcatctactctcgataaagacttgaacgttgaaagcactggagatacttctgctgctactaaagttggagaattagttgcaaaacgcgctgctgaaaaaggcatttctgacgtagtatttgaccgtggcggatacttataccatggacgtgtaaaagctttggctgatgccgctcgtgaagctggacttaaattttaataaaagaaggagggacacatgattatgcgtcgtattgacccaagcaaattagagttagaagaacgcttagttacggttaaccgcgtagcgaaagttgttaaaggtggtcgtcgtttccgcttcgcagctctagtcgttgtcggtgacaaaaacggacacgtaggattcggtactggtaaagcacaagaagtaccagaagcgatccgcaaagctgttgaagatgcgaaaaagaatttgattgaagtaccaatggttggaactacaattccacacgaaatcatcggacgtttcggtgcaggtaacatcttgttaaaacctgcttctgaaggtactggagttatcgctggaggccctgtacgtgcggtacttgagctagctggtgtagctgatatcctttctaagtctttaggttctaacacaccgatcaacatgattcgtgcaacacttcaaggtttaagtgagcttaaacgtgctgaagacgttgcgaagcttcgtggaaaatctgtagaagaactgttaggataaggagggaacattaatggctaaattagaaattaccctcaaacgaagtgtaatcggtcgcccggaagaccaacgcgttactgtaagaacacttggtttaaagaaaacaaaccaaactgttgttcatgaagacaacgctgcgatccgtggtatgattaataaagtatctcatttagtttctgttaaagaacaataaaaatatttgatcggataaggaggtgtcctaatgaaacttcatgaattaaaaccttcagaaggttcacgtaaaacgcgtaatcgcgtaggtcgtggtattggttctggcaacggtaaaacagctggtaaaggtcacaaaggtcaaaacgctcgttctggcggcggtgtacgccctggattcgaggggggacaaatgcctttattccaacgtcttcctaaacgcggtttcactaacatcaaccgcaaggaatacgctgtagtcaacctagacaaattgaacggttttgcagaaggaacggaagtcactcctgaacttcttctagagactggtgttattagcaaacttaatgcaggagtaaagattcttggcaacggtaaattagagaaaaaattaactgtaaaagccaataaattctctgcttctgcgaaagaagctgttgaagctgctggcggtacagctgaggtgatctaacttgtttaaaacaatctccaactttatgcgtgtgagtgatatcaggaataaaatcatattcactttactcatgcttatcgtctttcgcataggtgcgtttattcctgtgccttacgttaacgctgaagcgttacaggcacagtctcaaatgggtgtttttgatctccttaatacatttggcggcggtgcgctttaccaattttccattttcgcaatgggaattactccttatatcacggcttcgatcatcattcagctgcttcagatggatgtggtaccgaagtttaccgagtggtctaagcaaggtgaagttggccgccgtaaattagctcagttcacaaggtactttacgattgtgcttggtttcatccaagcgttaggtatgtcatatggattcaacaatctggcaaacggtatgctgatcgaaaaatccggtgtatcgacatatcttatcattgctttagtgctcactggcggaactgcctttttaatgtggcttggggaacaaattacttctcatggagtaggcaacggaatatcgatcattatcttcgcggggattgtgtctagtattccaaaaacaattgggcaaatatatgagactcaatttgtcggcagcaacgatcagttgtttattcatattgtgaaagtcgcacttcttgtgattgcgattttagcagttattgttggagttattttcattcagcaagccgtacggaaaattgcgattcaatatgctaaaggcacaggtcgttcacctgctggcggaggtcagtctacacaccttccattgaaagtgaatcctgcaggggttattccggtaatctttgcggttgcgtttttgataacgccgcggacgatcgcgtcattctttggaacaaacgatgtgacaaagtggattcaaaacaactttgataatacgcatccggtgggtatggcgatatatgttgcgttgattattgcctttacgtacttttatgcttttgtacaggtaaaccctgaacaaatggctgataaccttaaaaaacagggtggctatatcccgggggttcgtccagggaaaatgactcaagatagaattacgagcattttgtatcgacttacgtttgtgggttctatattcttagccgtgatttccattcttcctatctttttcattcaattcgctggattgcctcaaagtgcacaaattggcggaacatctttgttaattgttgtcggggtagccttggagacaatgaaacaactagaaagccagttggtgaaacgaaactaccgtggatttatgaaaaactagaggaaatggatttatccattccctcttaataaagagaggacgggggaaatccgaatgaacttagtcttaatggggcttcctggtgccggtaaaggcacacagggcgaacgaattgttgaggattatgggattcctcatatctcaacaggagatatgttccgtgctgctatgaaagaagaaacaccactcggactcgaagcaaaatcttatattgataagggagagctcgtacctgacgaagtcacaatcggaattgtaaaagagagacttggcaaagatgattgtgaaagaggttttcttctggacggatttccgcgaacagtcgctcaagccgaagctcttgaagaaattcttgaggaatacggcaagccgattgattatgtcattaacattgaagtcgacaaagatgttctgatggaacgtctgactggacgcagaatttgcagtgtttgcggcacaacctatcatttagtctttaatccgccgaaaacgccgggtatttgtgataaagacggaggcgaactctatcaacgggcagatgataatgaggaaacagtctctaaacggcttgaggtaaacatgaagcaaactcagcctttactcgatttctattcagagaaaggttatcttgcaaacgtgaatggccagcaggacattcaagacgtttatgcagatgtgaaggatcttcttggaggattaaaaaaatgattatctgtaaaaccccacgtgaacttggtatcatgcgggaagcagggcgaatcgtggctttaactcatgaagagttaaaaaagcacattaaaccaggaatctcgacaaaagaattggatcaaattgccgaacgttttattaagaagcagggtgcaatcccatcttttaaggggtataatgggtttcgcgggagcatttgcgtatcagttaatgaagaactcgttcacggcatacctggcagcagggtgctgaaggacggtgacatcatcagtattgatatcggtgctaaattaaatggttatcatggtgactctgcatggacatatccggtaggaaacatcagcgatgatgacaaaaaacttctggaagtgacagaggagtctttatataaaggcttgcaggaagcaaaaccaggtgaacgtttgtcgaatatttcccacgcaatacaaacgtatgtcgaaaatgagcagttttcagttgttagggagtatgtcggacatggtgttggtcaagacttgcatgaggacccgcaaattcctcattacggtccgcccaacaaaggaccacggcttaaacctggcatggttctcgctattgaacctatggtgaacgctggcagccgctacgtgaaaacattggctgataactggacggttgtaacggtagatgggaaaaagtgtgctcattttgaacatacgattgcgattacggaaacgggttttgatatactgacgagagtctagatgatgaaaataattccgaagacagatgtttttcaagcttgatagggcagaaagcttgggtgaacattggcaagaccgaattcatcttgctgcttgtcgttggaattttaaccatcatcaatgtactaacagcagacggagaaaagcgtacatttcattctcctaagaaaaagaatatcaatcatttaaccctttatgattgcgtatctccggaagttcagaacagtataaacgaaacagggcgtgtgacaaacttcttttgaaatttgtcagaaagcaagttactgatttgaagaagggagaacacttgaatggcgaaagacgatgtaattgaagtggaaggtactatagtcgaaacactgccaaacgcgatgttcaaagttgaacttgaaaatggccacactgttttggctcatgtatctggtaaaatccgcatgcacttcattcgcattttacctggagacaaagttacggtagaattatctccatatgacttaactcgtggcaggattacgtaccgttacaaataaagcactccggaaactgaaggaggttggaaacacatgaaagtgagaccatcagttaaaccaatctgcgaaaaatgtaaagttattcgcagaaaaggaaaagtaatggtgatctgtgaaaatccaaagcataaacaaaaacaaggataatttataaggaggtgcccagagaatggctcgtattgctggtgtagatatcccacgtgacaaacgtgttgttatttctttaacatacatcttcggaattggccgcacaacggctcagcaagttttaaaagaagctggagtttcagaagatactcgtgtgcgcgatcttactgaagaagaacttggtaaaatccgtgatattattgacaaactgaaagtagaaggtgaccttcgccgtgaagtttctcttaatatcaaacgtctgatcgaaatcggaagctaccgcggaatccgtcatcgcagaggattacctgttcgcggacaaaactctaaaaacaacgcgcgtactcgtaaaggtccgcgtcgtactgtagctaacaagaaaaaataagtaagggaggttcttaaacaatggctgctgctcgtaaatctaacacgcgtaaacgtcgcgtgaaaaagaatattgagtctggaattgctcatattcgttcaactttcaataacacgatcgttacgatcactgacactcatggtaatgctatttcttggtctagtgccggagctttaggattcagaggttctcgtaaatctactccttttgctgcgcaaatggctgcagaaacagctgctaaaggttcaatcgaacatggtcttaaaactctagaggttactgttaaaggacctggttcaggccgtgaagctgcaatccgtgcacttcaagctgctggactagaagtcactgctatcagagacgtaactcctgttcctcataacggatgccgtccaccaaaacgtcgccgcgtgtaatttgtttgtatagattttgtgtccctgtcaataatgggttatgatacagttatttatgaaacgaatgcaccgactcgttgcctgagcacatacgggactaaacaatggggaatttcggatggaatctcatatgattctattcgaggtttcgacgttttgaaggagggttttaagtaatgatcgagattgaaaaaccaaaaatcgaaacggttgaaatcagcgacgatgccaaatttggtaagtttgtcgtagagccacttgagcgtggatatggtacaactctgggtaactccttacgtcgtatcctcttatcctcactccctggtgccgctgtaacatcaatccagatagatggtgtactgcacgaattctcgacaattgaaggcgttgtggaagatgttacaacgattatcttacacattaaaaagcttgcattgaaaatctactctgatgaagagaagacgctagaaattgatgtacagggtgaaggaactgtaacggcagctgatattacacacgatagtgatgtagagatcttaaatcctgatcttcatatcgcgactcttggtgagaatgcgagtttccgagttcgccttactgctcaaagaggacgtgggtatacgcctgctgacgcaaacaagagagacgatcagccaatcggcgtgattccgatcgattctatctatacgccagtttctcgtgtatcttatcaggtagagaacactcgtgtaggccaagttgcaaactatgataaacttacacttgatgtttggactgatggaagcactggaccgaaagaagcaattgcgcttggttcaaagattttaactgaacaccttaatatattcgttggtttaactgacgaagctcaacatgctgaaatcatggttgaaaaagaagaagatcaaaaagagaaagttcttgaaatgacaattgaagaattggatctttctgttcgttcttacaactgcttaaagcgtgcgggtattaacacggttcaagagcttgcgaacaagacggaagaagatatgatgaaagttcgaaatctaggacgcaaatcacttgaagaagtgaaagcgaaactagaagaacttggactcggacttcgcaaagacgattgactagtttcccttgtgaactaggattttcgtgtgtttattattcagaaacagcattccaataaaggaggggacatcacatgtcatacagaaaactaggacgtacgagtgcacagcgtaaagctatgcttcgtgatcttacaactgatttgatcatcaacgaaagaatcgaaacaactgaaacacgtgcgaaagaacttcgctctgtagttgaaaaaatgatcacgcttggcaaacgcggtgatcttcacgctcgccgtcaagctgctgcatacatccgcaacgaggttgcaaacgaagaaaataaccaagatgcacttcaaaaattattctctgacattgcaactcgttacgaggagcgccaaggcggatacacacgtattatgaagcttggtcctcgccgtggtgacggagcaccaatggcaattatcgaattggtttaatcacatatttttgtgtatctaaagaagggcgggacagtttctaactggatctatgccctttttttagatactgcaacttttaatagagagaaaagcagagcattagctgagaggaggccggttttccatgaatcaaaatcagttgatatcggtagaggatatcgtatttcgatatcggaaggacgcagaaagacgagcactagacggcgtctccctgcaggtgtatgagggtgaatggcttgcaatcgtaggtcataacggttcagggaaatcaacactggcccgggcattgaatggtttaattcttcctgaatcaggcgacattgaggttgccgggattcaattgacagaggaatctgtttgggaagtgcgtaagaagataggtatggtctttcaaaatccggataaccaatttgtcggaacgactgttcgcgatgatgtggcttttggtttagaaaacaatggtgtaccgcgggaagaaatgattgagagagtagactgggcagtaaaacaggtgaatatgcaagattttctcgatcaagagccgcaccatctctccggaggccaaaagcagagagttgcgattgcgggggttattgccgcacgtcctgatattattatcttagatgaagcaacatccatgcttgatccgatcgggcgagaagaagtgcttgaaacggtaagacatttaaaagagcagggcatggcgactgtcatatccattacacatgatctgaatgaggcagcaaaagcagacaggatcattgtcatgaatggcggtaaaaaatatgctgaagggccgcctgaagagatttttaaattgaataaagaacttgttcgaattgggcttgatttacccttctcattccagcttagccagcttttaagagaaaatggactggctttggaagaaaaccatttgactcaggaagggctggtgaaagagctgtggacattacaatcaaagatgtagagcatcgctatcagatgaagacgccgtttgagcgcctagcactgtatgatatcaatgcatcgattaaagaaggaagctacgtagccgttatcgggcatacaggctctggcaagtccactcttcttcagcacctaaatggtctcctgaagccgacgaagggacagatatcactaggcagcactgtcattcaggcagggaaaaagaataaagatctgaaaaaacttcgtaaaaaagtcggaatcgttttccaatttcctgagcatcaattattcgaagaaacagttcttaaagatatttcattcggaccgatgaactttggtgttaaaaaagaagatgctgaacaaaaagcgagagagatgctgcagcttgtaggtttatcagaagagcttttggacaggtcaccctttgaattaagcgggggacaaatgcgcagagttgcaattgccggcgtacttgcaatggaccctgaagtgcttgttctcgatgaaccgactgcaggattggacccaagagggcgaaaagagattatggacatgttttatgagcttcatcaacgtgggaacctgacgacgatccttgtgacacacagcatggaggatgcagctgcatacgctgatgaaatgattgttatgcataaaggaatgatacaagcatcaggcagtccgcgtgatctgtttttaaagggtgaagagatggccggctgggggctggatcttcctgaaacaataaaattccaaagacaccttgaagctgtactgggtgtgagatttaatgagcctatgctcacaatcgaagatgccgctgccaaaatccgtgctctttttcagggggagaagactttatgatggacagcatgattatcggcaagtatgtaccgggtacttcacttgtgcaccggcttgaccccagaacaaaactgatcacgatctttttatttgtctgcatcgtattcttagccaataatgttcagacatatgcgttgcttggtttatttacaattggcgtcgtttctttaacaagagttcctttctcttttttaatgaaagggctgaagccaatcatctggattgtcctttttacgttccttcttcacatccttatgacacatgaaggaccgattatctttcaaataggttttttcaaagtctatgagggcggtctggttcaggggatattcatttctcttagattcgtctatttgattttaatcacaaccttattaacgcttacgaccacaccgattgagattaccgatggaatggaacagctgctgaacccattgaaaaaattaaagcttcctgttcatgagctggctcttatgatgtcaatttctttacggtttattccgacactgatggaggagacagataagatcatgaaggctcagatggcgcgaggcgttgattttacaagcgggcctgtcaaagatagagtgaaggctattgtcccgcttcttgtcccgctcttcgtcagcgcatttaaacgcgccgaagagcttgcggtggcaatggaagcaagaggctatcaaggcggagaaggacgtacgaaatatagaaagcttgtatggacaggaaaagacacttctgtcattgtcagcttaattgtattagctgctttgttatttttcttaagggcttagaggtgctgtatgagactgaaatgcacgatttcttatgacggacatttgtttaacggttatcaggttcagccgggcaaaagaacggttcaggatgaactggagaaggctttggctgtcctgcataagtcaaaagacagaattccggttgtttcgtctggaagaacagacagcggggttcacgcagccggacaggtgattcattttgacactccgctgtctatcccggctgagagatggccatatgccttaaatgcactgcttccggacgatatcgcagtcaaacaggcagaaattgcggatgatgggttccatgcacgatttagcgcagtcaaaaaagaatatcgctactttgtatacacggagaaacacccggacgtatttaaacggcattacgcttaccatttttcatatcgccttaatgtgcaggacatgagagaagcggcaaagcatcttatagggacacatgattttacgagcttttgcgcggctaaaacagaagtgcaggacaaggtaagaacgatatacgaacttgattggactgagacggctgacggcctgcaaatgcggatcacaggcagcggtttcttatataatatggtcagaattattgcgggtactttgcttgatgcaggtattggaaaaatttctcccgatgaggtgaaatccatgctggaagcgaaggatcgcgaagcggcagggcgcacagcgccggggcacgggctatatttatggaacgtttactatgacaactaaaccaggtgtataatattttcttgacagagtctgcataaagttataagatatcatatggtatgtatttcaaccccacgataagccccggaacttattgtgttgtgaaatagaacgtaatcgaagtttattgaaaatgacagatcatttaggagggaaattcaatgcgtacaacacctatggctaacgcaagtactattgaacgcaagtggttagttgttgatgctgctggcaagactttaggtcgtctttcttcagaagttgcagctatccttcgcggaaaacacaaaccaacttacacaccacacgttgatactggagatcatgtgatcatcatcaacgctgaaaaaatcgagttaactggtaaaaagttaactgacaaaatctactaccgtcacactcaacatccaggcggattaaaatcaagaactgctcttgaaatgcgtacaaactaccctgagaaaatgcttgagcttgctatcaaaggcatgcttccaaaaggttctctaggtcgtcaaatgttcaaaaaattgaacgtataccgtggttctgagcatccacacgaagcacaaaaacctgaagtttacgaacttcgcggttaattaaaaaggaggttaccaatttggcacaggttcaatattacggtactggccgtcgtaaaagctctgtagcgcgtgtgcgtttagttccaggagaaggccgtatcgtcgttaataatcgtgaaatcagcgaacatatcccatctgcagctttaatcgaagatatcaaacaaccattaactttgactgaaacagctggcacttatgatgttttagtaaacgtacatggaggcggcctatctggtcaagctggagcaatccgtcacggtatcgctcgtgctttgcttgaagcagatccagaataccgtacaactcttaaacgtgcaggtcttctgactcgtgacgctcgtatgaaagaacgtaaaaaatacggtcttaaaggcgctcgtcgtgcacctcagttctcaaaacgttaattttacgttttcaaaaagctctcgaccttgggttgggagcttttttctttcaataaaacgtggcagcctcgcataaaaataacaactgaatggacgtttggcggggttaagcaaattgtttgtttataaacggtctctttgtaataatcatgttagctttcattcttattcaattggaacttcggtcaatgtttattatcgttatgtgctcagcccagcttcatctaaccactgtatctcatccgttaaagttcactgctgattcttaacccggagaaacaatagctctcattgctaatggctttatgtaacgaagtaaaagtaaatctgatgatataaatcacatatctcctttgtgatttttttgcgtttttatgaacttttttctaaatatgcaaagggaaagcgatatcaatctagaaatatttgttatactctatacattaaagtaaggagaagattcatgaatgcgttagtagctcataatagcaaagcctgggataaaaaagtagaaacaggcaatgaatggactgttgctgttgagcagcaggttatcgaacaagcaaaaaaaggcaattgggatataagggtaacaccaatgaaagatgtaccgaaggattggtttccgcctatcaaaggtctgaaagtactctgtttagcatcaggcggcggccagcagggtccagttttggcagccgcaggcgcggatgtcaccgtattagataactcagaaaaacaactgaatcaggataaaatgattgctgagcgagatggtctcacgatacacactgtcaaaggaagcatggacgatttaagtgtatttaatgatgaatcatttgatgtcattgtacatcctgttgccaatgtttttgttgagaatgtcctcccggtatggaaggaagcgtaccgtgtgttgaaaaggaacggcattctaatctcgggttttgtcaatcctgttgtatttctgtttgatacagaattagaacagcaaggtgttttaaaagtaaaacactccattccatacgctgacccagaagatcttccgaaacataaagtgaaaaaactgatcgaaaataatgaggctctggaattcggtcattccttagaagaccaaatcaaaggccagattgatgccggttttatcgttactggtttttatgaagataaaggcgggtttgtattagaccaatatatccatacatattctgcaacaagaagcgtgaaagtatgaaaagcagcgacctgttagaggggctgcttttttcataaccaattacagaacgtttgttccgcaccctgcggaaagctgattttttatcgattttacaccttcatttgggcgaatttccaaccgaattcgggcattgtttcatcatccaaacctcaaaataatcggtaaaaggagagtgaatttatatggcagaagtactgtcttttatggatgtgaaacgccaaaaggattttgaattagaaaagaacttgctcaaagaactctctctgagacaaattatccagtctgttaaggattgtttggaaccattatttccatttttacatgatgaacgagatattattactgaaggctgtattgattttgcgattgaagcttatttgttaggcgggcgttttgggatattcggctattacggagaatccatgcagagtatcagtgcccgctctgcaagagaagaagaagagctacgtatggagttttttgattatctctataattggatacacgagcaatacgcaacatttgataaaaacacggtttatgaagcggcacgcaagttcattaaagattggtggacagcggggtttgttcaaagagaaaaacagtgtaagcttcgcatgcgataatcatatttcccggccctgtcccatagttatgtaataacggacaagcgggaggggaagggatgaggaaaaagcttaaatggctcagttttttgctaggcttcatcgtattactatttctgttcaaatatcagttcagcaataacgactcttggaagccgtggagcttgcccttgagcggtaaaatcatttatctagatccaggtcatggcgggcctgacggcggagcagtcggcggaaagctgttagagaaggatgttaccctggaagtggcctttagagtcagggattatcttcaagaacaaggagcgcttgttatcatgaccagagaaagtgatactgatctcgctccagaaggaacaaaaggctatagtcgacgaaaagctgaggatctaagacaacgagtcaaattaataaaccattcagaggcggagctctatatcagcattcatcttaatgcgattccgtcacaaaaatggagcggagcccaaagcttttattacgggaaatatgcggaaaatgagaaagtcgcaaaatacatccaggatgagctgagaagaaatctggaaaacacaacccggaaagcaaagcggattcatggtatctacttaatgcaaaacgtcaccaaaccgggggcgcttatagaagtcggatttttatccaatccaaacgaagcaacgctactcggtaaaccgaaatatcacgacaaggtggcatcttccatatataaaggcattttgcgatatttcacagaaaaaggagaccctccggagtaatggagggttttcttgtggttctaagcataagacacccgccatttatgtatgatataataataattgtaaacgaatacacaaaagggtgaggttcgatgataagagaagatgaagtaagaaaactagtcggagaaatgcgcgaaccttttcttcaaagacctctgggagaattggatgccgttaaggaaattaaaataaagcctgaaaaacggcatatcagtgtaaaagtcgctcttgcaaaaacaggaactgcagaacaaatgcagattcagcaagagatcgtaaacgtattaaaaggggcaggagctgagacagtcggccttcgatttgaagagctgcctgaagaaacggttgctaaattccgggcgccgtcagctgagaaaaaaacattattaaatatggataacccgccagtctttcttgctgtagcaagtggaaaaggcggcgtaggcaagtcaactgtgtcagtaaacctagctatttctctggctcgtctagggaaaaaggttggtttaattgatgcggatatttatgggttcagtgtgccggacatgatgggtatcactgtgcgtccaacaattgaaggagagaaacttcttcctgttgaacgctttggagtaaaggtcatgtcaatgggctttttcgtagaagaaaatgccccggtcgtatggagagggcccatgctcggcaaaatgctgaataattttttccatgaagtagagtggggagaagtagactatatcgttcttgatcttccgcctggtacaggggacgttgctctcgatgtacatacaatgcttccgagctgcaaagaaattatcgtatctacgccacatccgacagctgcttttgtcgcggccagagcgggctctatggcgattaaaaccgatcatgaggtcgtgggtgtcatagagaacatggcttattatgaaagtgcaaagacaggggaaagagaatatgtgtttggaaaaggcggaggagataaactggctgaggaactaaacgtgcctttgctcggcagaatcccattgaaacagcccgattgggataaggaccaatttgctccgtctgtttatgacgaaaatcatccaatcggagaaatatatcaggacatcgcaaaaaaaatagatgcaaaaatgtcagtgcaggtataaaaggtgaaccgggattccagatcccggctttccctttattcactttcttttgctgtgtcttttgctgcttttttcagctcatcttcgaactgctttttgtaaagcggactagaaagtgtttcgttaataacctcttctaaataactgcggaattcttggctttttgccagctggctgtactttttatccatgccgggatcctgcataacgctcatcagcatcttctggtaatctggatccttcatcagctttttaatcactttttcatgctctgtctgaagagttttggcaaagccctcagcaaaatcagtgtcttcaaagatgtttttccaaaattcttcaccttttttagatgtgagtgttttttctattgttcctttaattgcatcttggtcaatcaccagcgcttcattcatggcatcatcatttaataattccttaatagctttctttccatcatcagtttttaatatatcaacaaccatttttttggtctgatcatagtccatatccgttgcttggtcttttggagcgcaagctgttacagataataacaaaaaacagctcatcaatagcgttttggcttttgacatgcttaagctcctttcacatacttgtcttacctttaatatgattcatctgtttggaattatacataacaaaatatcgctgttcgcgatttttgaggggatgaataaagaaatgaaaagccgtggtttagttcgttttttcttttctattttagctgtcggggcgcttatcacgagtattgtgggttttgctttaaagtggggagaatatagagggctgtttctaacatttgaagcgggacagattttctctgttttattttggtttatcggtgtaggcatgattttcagtgtgatcagccaaatgggttttttcgtgtttttaacagttcatcggtttgcgcttgagatattaaggtcctcctctttgtggaatttgctgcagttgtttttcatcctgtttgttgcttttgatttaatgtacgtgcgttttttattttttggagagagcggagaatcgctggctggctatgcgtggttaccggtgtttttattgatctttggagtgattacagcttatataaagcaaaagcagtcctctaagaaaacatttgtgtcatcgttatttttgatggttgtgattaccgcattagaatggttccctgcattaagagtaaatgatgaggactggctttatttaatgctttttccgttaatggcatgtaatgccttccaattgctgatgctgccgaagtttgcagcaaagtaattactttacctctgcggatttggcatcagaatttgcgatgagatcacccacggttacattttttaatcctttttctttcagctgatggatgatatcaggcaatgcttcttctgtttgttttgcagaatcggaggcatgtaaaagaataatgtctccaccggaaacttgcttggtcacattgtcgatgattttttcaactccgggatttgtccagtcttgagagttcacactgtaatgaacgactgtataattgtattgctttgcgacctttagaacattcttattgaattggccggtagggggtcttaatagctgtatgtctttgacccctaacttttcaaaggctgtttgcgcacggttcatgtccttttttatttcgctgctctctaaattggcatagtttttataagcgtagcccatgctcccgatttgatggccgtcctttacgatacgggccactgtgtcgggatggcgttctgcccaagaagcggacaggaaaaacgttgcgtttttaatcccgtttgctttcagagtattaagtatcggttctgctctctcatcaccccagctgatatcgaaagtaagtgaaatatctttagagtctgtttctcctttataaatggctttaggtccggtgtcagttgaaaacacgggaagcgggacagctctttggatataaaaaaagctggcagctgcaaatgcggcgataagtataataattaattgttttacccgtttaatgtgccacacatagaagtgattcactgatgatgcctccttatcttgtccatcattcttgttttacatcttatgagcatggacaattgaatataaccgataaaatgtctcttcacatacagcctaaattgggtgttgaccttttgataatatccgtgatatattattattcgtcgctgataaacagctgacatcaactaaaagcttcattaaatactttgaaaaaagttgttgacttaaaagaagctaaatgttatagtaataaagctgcttcgttaagcggcagtaatgatctttgaaaactaaacaagacaaaacgtacctgttaattcatttttataaatcgcacagcgatgtgcgtagtcagtcaaactagggcctgtacgatgcaggtcacacaggtgtcgccgcaggatgcggtgaacttaacctgtgatccatttatcggagagtttgatcctggctcaggacgaacgctggcggcgtgcctaatacatgcaagtcgagcggacagatgggagcttgctccctgatgttagcggcggacgggtgagtaacacgtgggtaacctgcctgtaagactgggataactccgggaaaccggggctaataccggatggttgtttgaaccgcatggttcaaacataaaaggtggcttcggctaccacttacagatggacccgcggcgcattagctagttggtgaggtaatggctcaccaaggcaacgatgcgtagccgacctgagagggtgatcggccacactgggactgagacacggcccagactcctacgggaggcagcagtagggaatcttccgcaatggacgaaagtctgacggagcaacgccgcgtgagtgatgaaggttttcggatcgtaaagctctgttgttagggaagaacaagtaccgttcgaatagggcggtaccttgacggtacctaaccagaaagccacggctaactacgtgccagcagccgcggtaatacgtaggtggcaagcgttgtccggaattattgggcgtaaagggctcgcaggcggtttcttaagtctgatgtgaaagcccccggctcaaccggggagggtcattggaaactggggaacttgagtgcagaagaggagagtggaattccacgtgtagcggtgaaatgcgtagagatgtggaggaacaccagtggcgaaggcgactctctggtctgtaactgacgctgaggagcgaaagcgtggggagcgaacaggattagataccctggtagtccacgccgtaaacgatgagtgctaagtgttagggggtttccgccccttagtgctgcagctaacgcattaagcactccgcctggggagtacggtcgcaagactgaaactcaaaggaattgacgggggcccgcacaagcggtggagcatgtggtttaattcgaagcaacgcgaagaaccttaccaggtcttgacatcctctgacaatcctagagataggacgtccccttcgggggcagagtgacaggtggtgcatggttgtcgtcagctcgtgtcgtgagatgttgggttaagtcccgcaacgagcgcaacccttgatcttagttgccagcattcagttgggcactctaaggtgactgccggtgacaaaccggaggaaggtggggatgacgtcaaatcatcatgccccttatgacctgggctacacacgtgctacaatggacagaacaaagggcagcgaaaccgcgaggttaagccaatcccacaaatctgttctcagttcggatcgcagtctgcaactcgactgcgtgaagctggaatcgctagtaatcgcggatcagcatgccgcggtgaatacgttcccgggccttgtacacaccgcccgtcacaccacgagagtttgtaacacccgaagtcggtgaggtaaccttttaggagccagccgccgaaggtgggacagatgattggggtgaagtcgtaacaaggtagccgtatcggaaggtgcggctggatcacctcctttctaaggatattatacggaatataagaccttgggtcttataaacagaacgttccctgtcttgtttagttttgaaggatcattccttcgaaacgtgttctttgaaaactagataacagtagacatcacattcaattagtaatacaagatatcacatagtgattctttttaacggttaagttagaaagggcgcacggtggatgccttggcactaggagccgatgaaggacgggacgaacaccgatatgcttcggggagctgtaagcaagctttgatccggagatttccgaatggggaaacccaccactcgtaatggagtggtatccatatctgaattcataggatatgagaaggcagacccggggaactgaaacatctaagtacccggaggaagagaaagcaaatgcgattccctgagtagcggcgagcgaaacgggattagcccaaaccaagaggcttgcctcttggggttgtaggacactctgtacggagttacaaaagaacgaggtagatgaagaggtctggaaaggcccgccataggaggtaacagccctgtagtcaaaacttcgttctctcctgagtggatcctgagtacggcggaacacgtgaaattccgtcggaatccgggaggaccatctcccaaggctaaatactccctagtgaccgatagtgaaccagtaccgtgagggaaaggtgaaaagcaccccggaaggggagtgaaagagatcctgaaaccgtgtgcctacaagtagtcagagcccgttaacgggtgatggcgtgccttttgtagaatgaaccggcgagttacgatcccgtgcaaggttaagcagaagatgcggagccgcagcgaaagcgagtctgaatagggcgcatgagtacgtggtcgtagacccgaaaccaggtgatctacccatgtccagggtgaagttcaggtaacactgaatggaggcccgaacccacgcacgttgaaaagtgcggggatgaggtgtgggtaggggtgaaatgccaatcgaacctggagatagctggttctctccgaaatagctttagggctagcctcaaggtaagagtcttggaggtagagcactgattggactaggggcccctaccgggttaccgaattcagtcaaactccgaatgccaatgacttatccttgggagtcagactgcgagtgataagatccgtagtcgaaagggaaacagcccagaccgccagctaaggtcccaaagtatacgttaagtggaaaaggatgtggagttgcttagacaaccaggatgttggcttagaagcagccaccatttaaagagtgcgtaatagctcactggtcgagtgactctgcgccgaaaatgtaccggggctaaacgtatcaccgaagctgcggactgttcttcgaacagtggtaggagagcgttctaagggctgtgaagccagaccggaaggactggtggagcgcttagaagtgagaatgccggtatgagtagcgaaagaggggtgagaatcccctccaccgaatgcctaaggtttcctgaggaaggctcgtccgctcagggttagtcgggacctaagccgaggccgaaaggcgtaggcgatggacaacaggttgatattcctgtaccacctcctcaccatttgagcaatggggggacgcaggaggatagggtaagcgcggtattggatatccgcgtccaagcagttaggctgggaaataggcaaatccgtttcccataaggctgagctgtgatggcgagcgaaatatagtagcgaagttcctgattccacactgccaagaaaagcctctagcgaggtgagaggtgcccgtaccgcaaaccgacacaggtaggcgaggagagaatcctaaggtgatcgagagaactctcgttaaggaactcggcaaaatgaccccgtaacttcgggagaaggggtgctctgttagggtgcaagcccgagagagccgcagtgaataggcccaggcgactgtttagcaaaaacacaggtctctgcgaagccgtaaggcgaagtataggggctgacgcctgcccggtgctggaaggttaagaggagcgcttagcgtaagcgaaggtgcgaattgaagccccagtaaacggcggccgtaactataacggtcctaaggtagcgaaattccttgtcgggtaagttccgacccgcacgaaaggcgcaacgatctgggcactgtctcaacgagagactcggtgaaattatagtacctgtgaagatgcaggttacccgcgacaggacggaaagaccccgtggagctttactgcagcctgatattgaatgttggtacagcttgtacaggataggtaggagccttggaaaccggagcgccagcttcggtggaggcatcggtgggatactaccctggctgtattgaccttctaacccgccgcccttatcgggcggggagacagtgtcaggtgggcagtttgactggggcggtcgcctcctaaaaggtaacggaggcgcccaaaggttccctcagaatggttggaaatcattcgcagagtgtaaaggcacaagggagcttgactgcgagacctacaagtcgagcagggacgaaagtcgggcttagtgatccggtggttccgcatggaagggccatcgctcaacggataaaagctaccccggggataacaggcttatctcccccaagagtccacatcgacggggaggtttggcacctcgatgtcggctcatcgcatcctggggctgtagtcggtcccaagggttgggctgttcgcccattaaagcggtacgcgagctgggttcagaacgtcgtgagacagttcggtccctatccgtcgcgggcgcaggaaatttgagaggagctgtccttagtacgagaggaccgggatggacgcaccgctggtgtaccagttgttctgccaagggcatcgctgggtagctatgtgcggacgggataagtgctgaaagcatctaagcatgaagcccccctcaagatgagatttcccattccgcaaggaagtaagatccctgaaagatgatcaggttgataggtctgaggtggaagtgtggcgacacatggagctgacagatactaatcgatcgaggacttaaccatatttttgaatgatgtcacacctgttatctagttttgagagaacactctcaatttgtttggtggcgatagcgaagaggtcacacccgttcccataccgaacacggaagttaagctcttcagcgccgatggtagtcgggggtttccccctgtgagagtaggacgccgccaagcagatttattaattctaccatgtttgtttatgaagctttatattattccgcagtagctcagtggtagagctatcggctgttaaccgatcggtcgtaggttcgaatcctacctgcggagccattgcttccatagctcagcaggtagagcacttccatggtaaggaagaggtcagcggttcgagcccgcttggaagctttatttaatgtattattaccaaggtttctcataaggagaaagctttttttattgcgatatgcggaagtagttcagtggtagaacaccaccttgccaaggtgggggtcgcgggttcgaatcccgtcttccgctccatttatcccaacgggatattgtaaattgaattgcgcccgtagctcaattggatagagcgtttgactacggatcaaaaggttaggggttcgactcctctcgggcgcgccatatcttttaatagaatagatgggaaatcgggaagtagctcagcttggtagagcacatggtttgggaccatggggtcgcaggttcgaatcctgtcttcccgaccattttttatggggccttagctcagctgggagagcgcctgctttgcacgcaggaggtcagcggttcgatcccgctaggctccaccaaaagtttttaaaaagttgttgactttgaagaagtgacgttgtatactaataaagttactttaacaaagcaaataaacaaaatgatctttgaaaactaaacaagacaaaacgtacctgttaattcagtttttaaaaaatcgcacagcgatgtgcgtagtcagtcaaactactttatcggagagtttgatcctggctcaggacgaacgctggcggcgtgcctaatacatgcaagtcgagcggacagatgggagcttgctccctgatgttagcggcggacgggtgagtaacacgtgggtaacctgcctgtaagactgggataactccgggaaaccggggctaataccggatggttgtttgaaccgcatggttcaaacataaaaggtggcttcggctaccacttacagatggacccgcggcgcattagctagttggtgaggtaacggctcaccaaggcgacgatgcgtagccgacctgagagggtgatcggccacactgggactgagacacggcccagactcctacgggaggcagcagtagggaatcttccgcaatggacgaaagtctgacggagcaacgccgcgtgagtgatgaaggttttcggatcgtaaagctctgttgttagggaagaacaagtaccgttcgaatagggcggtaccttgacggtacctaaccagaaagccacggctaactacgtgccagcagccgcggtaatacgtaggtggcaagcgttgtccggaattattgggcgtaaagggctcgcaggcggtttcttaagtctgatgtgaaagcccccggctcaaccggggagggtcattggaaactggggaacttgagtgcagaagaggagagtggaattccacgtgtagcggtgaaatgcgtagagatgtggaggaacaccagtggcgaaggcgactctctggtctgtaactgacgctgaggagcgaaagcgtggggagcgaacaggattagataccctggtagtccacgccgtaaacgatgagtgctaagtgttagggggtttccgccccttagtgctgcagctaacgcattaagcactccgcctggggagtacggtcgcaagactgaaactcaaaggaattgacgggggcccgcacaagcggtggagcatgtggtttaattcgaagcaacgcgaagaaccttaccaggtcttgacatcctctgacaatcctagagataggacgtccccttcgggggcagagtgacaggtggtgcatggttgtcgtcagctcgtgtcgtgagatgttgggttaagtcccgcaacgagcgcaacccttgatcttagttgccagcattcagttgggcactctaaggtgactgccggtgacaaaccggaggaaggtggggatgacgtcaaatcatcatgccccttatgacctgggctacacacgtgctacaatggacagaacaaagggcagcgaaaccgcgaggttaagccaatcccacaaatctgttctcagttcggatcgcagtctgcaactcgactgcgtgaagctggaatcgctagtaatcgcggatcagcatgccgcggtgaatacgttcccgggccttgtacacaccgcccgtcacaccacgagagtttgtaacacccgaagtcggtgaggtaaccttttaggagccagccgccgaaggtgggacagatgattggggtgaagtcgtaacaaggtagccgtatcggaaggtgcggctggatcacctcctttctaaggatattatacggaatataagaccttgggtcttataaacagaacgttccctgtcttgtttagttttgaaggatcattccttcgaaacgtgttctttgaaaactagataacagtagacatcacattcaattagtaatacaagatatcacatagtgattctttttaacggttaagttagaaagggcgcacggtggatgccttggcactaggagccgatgaaggacgggacgaacaccgatatgcttcggggagctgtaagcaagctttgatccggagatttccgaatggggaaacccaccactcgtaatggagtggtatccatatctgaattcataggatatgagaaggcagacccggggaactgaaacatctaagtacccggaggaagagaaagcaaatgcgattccctgagtagcggcgagcgaaacgggattagcccaaaccaagaggcttgcctcttggggttgtaggacactctgtacggagttacaaaagaacgaggtagatgaagaggtctggaaaggcccgccataggaggtaacagccctgtagtcaaaacttcgttctctcctgagtggatcctgagtacggcggaacacgtgaaattccgtcggaatccgggaggaccatctcccaaggctaaatactccctagtgaccgatagtgaaccagtaccgtgagggaaaggtgaaaagcaccccggaaggggagtgaaagagatcctgaaaccgtgtgcctacaagtagtcagagcccgttaacgggtgatggcgtgccttttgtagaatgaaccggcgagttacgatcccgtgcaaggttaagcagaagatgcggagccgcagcgaaagcgagtctgaatagggcgcatgagtacgtggtcgtagacccgaaaccaggtgatctacccatgtccagggtgaagttcaggtaacactgaatggaggcccgaacccacgcacgttgaaaagtgcggggatgaggtgtgggtaggggtgaaatgccaatcgaacctggagatagctggttctctccgaaatagctttagggctagcctcaaggtaagagtcttggaggtagagcactgattggactaggggcccctaccgggttaccgaattcagtcaaactccgaatgccaatgacttatccttgggagtcagactgcgagtgataagatccgtagtcgaaagggaaacagcccagaccgccagctaaggtcccaaagtatacgttaagtggaaaaggatgtggagttgcttagacaaccaggatgttggcttagaagcagccaccatttaaagagtgcgtaatagctcactggtcgagtgactctgcgccgaaaatgtaccggggctaaacgtatcaccgaagctgcggactgttcttcgaacagtggtaggagagcgttctaagggctgtgaagccagaccggaaggactggtggagcgcttagaagtgagaatgccggtatgagtagcgaaagaggggtgagaatcccctccaccgaatgcctaaggtttcctgaggaaggctcgtccgctcagggttagtcgggacctaagccgaggccgaaaggcgtaggcgatggacaacaggttgatattcctgtaccacctcctcaccatttgagcaatggggggacgcaggaggatagggtaagcgcggtattggatatccgcgtccaagcagttaggctgggaaataggcaaatccgtttcccataaggctgagctgtgatggcgagcgaaatatagtagcgaagttcctgattccacactgccaagaaaagcctctagcgaggtgagaggtgcccgtaccgcaaaccgacacaggtaggcgaggagagaatcctaaggtgatcgagagaactctcgttaaggaactcggcaaaatgaccccgtaacttcgggagaaggggtgctctgttagggtgcaagcccgagagagccgcagtgaataggcccaggcgactgtttagcaaaaacacaggtctctgcgaagccgtaaggcgaagtataggggctgacgcctgcccggtgctggaaggttaagaggagcgcttagcgtaagcgaaggtgcgaattgaagccccagtaaacggcggccgtaactataacggtcctaaggtagcgaaattccttgtcgggtaagttccgacccgcacgaaaggcgcaacgatctgggcactgtctcaacgagagactcggtgaaattatagtacctgtgaagatgcaggttacccgcgacaggacggaaagaccccgtggagctttactgcagcctgatattgaatgttggtacagcttgtacaggataggtaggagccttggaaaccggagcgccagcttcggtggaggcatcggtgggatactaccctggctgtattgaccttctaacccgccgcccttatcgggcggggagacagtgtcaggtgggcagtttgactggggcggtcgcctcctaaaaggtaacggaggcgcccaaaggttccctcagaatggttggaaatcattcgcagagtgtaaaggcacaagggagcttgactgcgagacctacaagtcgagcagggacgaaagtcgggcttagtgatccggtggttccgcatggaagggccatcgctcaacggataaaagctaccccggggataacaggcttatctcccccaagagtccacatcgacggggaggtttggcacctcgatgtcggctcatcgcatcctggggctgtagtcggtcccaagggttgggctgttcgcccattaaagcggtacgcgagctgggttcagaacgtcgtgagacagttcggtccctatccgtcgcgggcgcaggaaatttgagaggagctgtccttagtacgagaggaccgggatggacgcaccgctggtgtaccagttgttctgccaagggcatcgctgggtagctatgtgcggacgggataagtgctgaaagcatctaagcatgaagcccccctcaagatgagatttcccattccgcaaggaagtaagatccctgaaagatgatcaggttgataggtctgaggtggaagtgtggcgacacatggagctgacagatactaatcgatcgaggacttaaccatatttttgaatgatgtcacacctgttatctagttttgagagaacactctcaatttgtttggtggcgatagcgaagaggtcacacccgttcccataccgaacacggaagttaagctcttcagcgccgatggtagtcgggggtttccccctgtgagagtaggacgccgccaagcaattgcacgttagtgtaattttttaaaaaaagttgttgactttgaagaagtgacgttgtatactaataaagttgctttaacaaagcggacaaacaaaatgatctttgaaaactaaacaagacaaaacgtacctgttaattcagtttttaaaaatcgcacagcgatgtgcgtagtcagtcaaactactttatcggagagtttgatcctggctcaggacgaacgctggcggcgtgcctaatacatgcaagtcgagcggacagatgggagcttgctccctgatgttagcggcggacgggtgagtaacacgtgggtaacctgcctgtaagactgggataactccgggaaaccggggctaataccggatggttgtttgaaccgcatggttcaaacataaaaggtggcttcggctaccacttacagatggacccgcggcgcattagctagttggtgaggtaacggctcaccaaggcgacgatgcgtagccgacctgagagggtgatcggccacactgggactgagacacggcccagactcctacgggaggcagcagtagggaatcttccgcaatggacgaaagtctgacggagcaacgccgcgtgagtgatgaaggttttcggatcgtaaagctctgttgttagggaagaacaagtaccgttcgaatagggcggtaccttgacggtacctaaccagaaagccacggctaactacgtgccagcagccgcggtaatacgtaggtggcaagcgttgtccggaattattgggcgtaaagggctcgcaggcggtttcttaagtctgatgtgaaagcccccggctcaaccggggagggtcattggaaactggggaacttgagtgcagaagaggagagtggaattccacgtgtagcggtgaaatgcgtagagatgtggaggaacaccagtggcgaaggcgactctctggtctgtaactgacgctgaggagcgaaagcgtggggagcgaacaggattagataccctggtagtccacgccgtaaacgatgagtgctaagtgttagggggtttccgccccttagtgctgcagctaacgcattaagcactccgcctggggagtacggtcgcaagactgaaactcaaaggaattgacgggggcccgcacaagcggtggagcatgtggtttaattcgaagcaacgcgaagaaccttaccaggtcttgacatcctctgacaatcctagagataggacgtccccttcgggggcagagtgacaggtggtgcatggttgtcgtcagctcgtgtcgtgagatgttgggttaagtcccgcaacgagcgcaacccttgatcttagttgccagcattcagttgggcactctaaggtgactgccggtgacaaaccggaggaaggtggggatgacgtcaaatcatcatgccccttatgacctgggctacacacgtgctacaatggacagaacaaagggcagcgaaaccgcgaggttaagccaatcccacaaatctgttctcagttcggatcgcagtctgcaactcgactgcgtgaagctggaatcgctagtaatcgcggatcagcatgccgcggtgaatacgttcccgggccttgtacacaccgcccgtcacaccacgagagtttgtaacacccgaagtcggtgaggtaaccttttaggagccagccgccgaaggtgggacagatgattggggtgaagtcgtaacaaggtagccgtatcggaaggtgcggctggatcacctcctttctaaggatattatacggaatataagaccttgggtcttataaacagaacgttccctgtcttgtttagttttgaaggatcattccttcgaaacgtgttctttgaaaactagataacagtagacatcacattcaattagtaacacaagatatcacatagtgattctttttaacggttaagttagaaagggcgcacggtggatgccttggcactaggagccgatgaaggacgggacgaacaccgatatgcttcggggagctgtaagcaagctttgatccggagatttccgaatggggaaacccaccactcgtaatggagtggtatccatatctgaattcataggatatgagaaggcagacccggggaactgaaacatctaagtacccggaggaagagaaagcaaatgcgattccctgagtagcggcgagcgaaacgggattagcccaaaccaagaggcttgcctcttggggttgtaggacactctgtacggagttacaaaagaacgaggtagatgaagaggtctggaaaggcccgccataggaggtaacagccctgtagtcaaaacttcgttctctcctgagtggatcctgagtacggcggaacacgtgaaattccgtcggaatccgggaggaccatctcccaaggctaaatactccctagtgaccgatagtgaaccagtaccgtgagggaaaggtgaaaagcaccccggaaggggagtgaaagagatcctgaaaccgtgtgcctacaagtagtcagagcccgttaacgggtgatggcgtgccttttgtagaatgaaccggcgagttacgatcccgtgcaaggttaagcagaagatgcggagccgcagcgaaagcgagtctgaatagggcgcatgagtacgtggtcgtagacccgaaaccaggtgatctacccatgtccagggtgaagttcaggtaacactgaatggaggcccgaacccacgcacgttgaaaagtgcggggatgaggtgtgggtaggggtgaaatgccaatcgaacctggagatagctggttctctccgaaatagctttagggctagcctcaaggtaagagtcttggaggtagagcactgattggactaggggcccctaccgggttaccgaattcagtcaaactccgaatgccaatgacttatccttgggagtcagactgcgagtgataagatccgtagtcgaaagggaaacagcccagaccgccagctaaggtcccaaagtatacgttaagtggaaaaggatgtggagttgcttagacaaccaggatgttggcttagaagcagccaccatttaaagagtgcgtaatagctcactggtcgagtgactctgcgccgaaaatgtaccggggctaaacgtatcaccgaagctgcggactgttcttcgaacagtggtaggagagcgttctaagggctgtgaagccagaccggaaggactggtggagcgcttagaagtgagaatgccggtatgagtagcgaaagaggggtgagaatcccctccaccgaatgcctaaggtttcctgaggaaggctcgtccgctcagggttagtcgggacctaagccgaggccgaaaggcgtaggcgatggacaacaggttgatattcctgtaccacctcctcaccatttgagcaatggggggacgcaggaggatagggtaagcgcggtattggatatccgcgtccaagcagttaggctgggaaataggcaaatccgtttcccataaggctgagctgtgatggcgagcgaaatatagtagcgaagttcctgattccacactgccaagaaaagcctctagcgaggtgagaggtgcccgtaccgcaaaccgacacaggtaggcgaggagagaatcctaaggtgatcgagagaactctcgttaaggaactcggcaaaatgaccccgtaacttcgggagaaggggtgctctgttagggtgcaagcccgagagagccgcagtgaataggcccaggcgactgtttagcaaaaacacaggtctctgcgaagccgtaaggcgaagtataggggctgacgcctgcccggtgctggaaggttaagaggagcgcttagcgtaagcgaaggtgcgaattgaagccccagtaaacggcggccgtaactataacggtcctaaggtagcgaaattccttgtcgggtaagttccgacccgcacgaaaggcgcaacgatctgggcactgtctcaacgagagactcggtgaaattatagtacctgtgaagatgcaggttacccgcgacaggacggaaagaccccgtggagctttactgcagcctgatattgaatgttggtacagcttgtacaggataggtaggagccttggaaaccggagcgccagcttcggtggaggcatcggtgggatactaccctggctgtattgaccttctaacccgccgcccttatcgggcggggagacagtgtcaggtgggcagtttgactggggcggtcgcctcctaaaaggtaacggaggcgcccaaaggttccctcagaatggttggaaatcattcgcagagtgtaaaggcacaagggagcttgactgcgagacctacaagtcgagcagggacgaaagtcgggcttagtgatccggtggttccgcatggaagggccatcgctcaacggataaaagctaccccggggataacaggcttatctcccccaagagtccacatcgacggggaggtttggcacctcgatgtcggctcatcgcatcctggggctgtagtcggtcccaagggttgggctgttcgcccattaaagcggtacgcgagctgggttcagaacgtcgtgagacagttcggtccctatccgtcgcgggcgcaggaaatttgagaggagctgtccttagtacgagaggaccgggatggacgcaccgctggtgtaccagttgttctgccaagggcatcgctgggtagctatgtgcggacgggataagtgctgaaagcatctaagcatgaagcccccctcaagatgagatttcccattccgcaaggaagtaagatccctgaaagatgatcaggttgataggtctgaggtggaagtgtggcgacacatggagctgacagatactaatcgatcgaggacttaaccatatttttgaatgatgtcacacctgttatctagttttgagagaacactctcaatttgtttggtggcgatagcgaagaggtcacacccgttcccataccgaacacggaagttaagctcttcagcgccgatggtagtcgggggtttccccctgtgagagtaggacgccgccaagcaagcttaaacccagctcattgagctgggttttttattttatatctgtgccgatttgcttttatcagtatccattttatcaagcttctgctttttaagttttctaatacttttgaatccaatacaatcaccagcatgatcaacatgagagtcataaataatcaaaatgcagtttgtacgggagactcatccagactccatccgtctgcaattggcagaatagagccgccaatccattggcagcgagcagcatgcctgtcgtttgttctgtttttccatgatgaaattgattggtgacaattaagataatggcgaacatgctggccataaataagtcctaagaaaaaactaagaataatccctgcaaaagctgttttattgattgccaaaatacagagttaaatgaggccgctcatatttatcagcctgagataatgatgataggttattttttcggaaaccggctcgggttgccaaatgagagaaaagatattactgtcattaaaacgattcttggtttcatccggatatgataaaatgtctcagactatatttgagccatttttttcttcagcaatcatcttgcgtaattgataaaaatttattatgatactctttgtatgacaactccttgcctcaatacaatatactcaacgtttccccgttttctccggtcgtttttcttttcattttctcccgtaaaataaaaaaagctcccaatacaatagatatggtgcggatttattttttactaaaaaggagtcgttatatttgaataatagttttacattaaaacagcaatggttcgggaatatccgaaaagacattcttgctggcattttagttgcgttagcgttaatacctgaagcgattggcttttctattatagccggtgtggatccgatggtcggtctttatgcgtcattttgcatagccattattatttctatttttggcggcagacctggcatgatttcagctgcgacaggctcaatggcagttgttatggtgtcgctggttgctgatcatgggcttcagtatttatttgcagctacgattttgactggcattattcaagtgattttaggtatcagtaaaattgcaagattaatgaaattcatcccgcgttctgtgatgatcgggtttgtgaatgcgctggcaatccttatcttctctgcgcagcttccccagtttgaaggtgcttcttggagcatgtatgcgatgcttgccgggtcgttggttattatttatgtgctgccaaggtttacgactgctgttccgtctccgcttgtggcgattattgtgatgacaattattgcggtcactttccatgtggatgtgcggacggttggtgatatgggcaatatttctagttcattgcctcatttcttaatccctgatgttccgtttacctttgaaacactgcaaattatttttccttattcaattgctttagcgtttgtcgggttgcttgaatctttgctgacagcacagattattgatgaaatgacggatacggatagtgataaaaataaagagagccgcggacagggaattgcgaatatcgtgactggattctttggcggaatggcaggctgcgctatgatcggacaatctgtcattaatacaaaagcgggcggtcgcggacgtttgtcagcatttgttgccggtgcttttctgatgtttttaattgcggtgttaagtcatgtcgtggtgaaaatcccaatggcggcgttagtggctgtaatggttatggtgtctgtcggcacttttgattggtcttctttaaaaggtctcaaaaaagcgccgctcacggactcgattgtcacggttgtgactgtggttacggttgttgtgacagatgacttatctaagggtgtatttgtcggtgttcttttaagtgccgtgttctttgtagcaaaaatctcgaagctgaaaatcgtttctcatgcagaggatcaaaagcttagaacgtatcaagtgaaggggcaaatcttttttgcgtcagtgactgatcttacgaatgcgtttatatatcaagaggatattgagcgggttgtgattgacttaactgaagctcacgtatgggacgattctggtgcggccgcacttgataagattgttgcgaagtttaaggaacaaggcattgaagctgagttaaaaggtttgaataaagcgagtaaatctctaatgaaacagatggcataaaatagagaagcccagatgaatgagatctgggcttttttatataacatacacttaagcagcattgatataatagagagaagagaaattttaaataggggacttgcatatgatgcttcagaagctgaaccgtgtattggggagagtgatgccgctgttaacgccgactagtgtggtgttgggcgtgctgctgtctcagtttttaaatgggtatgaatgggctgtaccttggatctttgcttttattacgtttgcaggcagtttgagcgcgaactttcaatctttgagacatgcattgtctcatcctctccctatgattcttgcactattcgttcttcatattttcatgccgctttttgcttggggcagcggccatcttatatttaaaggtgatcctttgacgattaccggtttaacattggctgttgtgattcctacggggattacaagcttgatttgggcagcgatgtacaaagggaatgtcggtttgacactttcgattattttaattgatactgtgctgtcaccgctaatcgtaccgctgagtctttcattgctggccggcgctcaggttcatatggatgtgtggggaatgatgaaaggtctgattgtaatggtcgtgattccttcttttctgggcatgctgtttaatcagatgtcatctccagaaagaactgcgtctgtgagcagtgcgctgtcgcctttttcaaagctttgcttgatggcagtgattgcgattaacagttcagcgattgctccttatttcaaatccattgatttgagatttgcaggaatagctgtaacggtattctttatcgcgttaacaggctatgccgctgcttggctgatcggaaaaatgatgaaaaggcggcaagaggaaatagtctctcttatatttacgggaggcatgaggaatattagtgccggcgcagttcttgccgttacgttcttcccgtctcaggttgccgttcctgttgtgatcggcatgctgtttcagcagatattggctgctttgtttggctatatgctgaatcgttttgaattaaaaccaatgttgcagaaagcataaaaaaaccgctcatagggttgagcggttttttccgtatagccattcgagcgcgttgatgaactgtttgcagaaatacttgcggtggtgcaccgctcctttttcaattgaaagatacaaccggtcttcagtgaagcctttttcttttagactttgatgaacttgctttgtttttttcagcatatgtcgctgaatggattgtttttcacggccttcttcactcccgacagacatgaaaacacgtgtagtgccgggctttaaagaagatatatgaatggtttccgctgcgttctcgtaccagtatgaacctgatatagagcctattttcccgaacattgacggatattttaataaggcgaacattgagatgaggccgcctaatgaggcaccgatcattcctcttgactgcggttccctgatgacgttccagttttcttcgattagcggaatgaactggttcgttatatcagacagatagtgatatcccattccgccgaagtccgtgaaccgatcactgagtgatgcagccggccaaggtgtgtattcatttagccggttttcgggttcgataccgatcagcacgagttcagggagcctttgctgttgatatgcgctttctaataattcgatttggttttggaacaaagaactgccatcctgcacgtaaacagcaggaaatcccccgctgtctgtgctgtaggaaggagggaggtacagcgtgaacctcctgttgccggctttgtgttctgaaagagatcctttcaagcattctccccctttttttgcttgaaaagcagatataagaaataaggaactccgaggatcgccaaaatgatgcctgcgggcacttctgcgggctgaaaaaacagttttccggcaaagtctgcgcttatcacaagaagcatcccgattaaaccgctcagtggcaggatatagcgatgttcgacgccagccagtctccgtgagatatggggagcaattaagccgacaaacgccatacttcccgctacggagacacaggcgctgatgattgctacacaggctacgagcaggatggttttttctttatttgatgaaatgccgaggcttctgactgtgtcttcatcaaaacgaatggtgtcgagcaggcgggatttgccgataagaatcggtataaacagcagcatccatgggagaacggctgtgatatacgtccagttggcagaccagatgcttccgtttttccacaccatggccatttgatagtcttgcgggtccatttttaaagataaaaacaaagacagggcgctgaatcctgaattgatcgcaatccctaccagaataattcttcctgaatctaaattgcctctgtgccatgcaaatatgtaaatcaggatcgccgcgatgagcccgcctatcaatccaaagagcggcattcccatcgctgcagctatggatgtcacttccttctggccttggaataagagcataaacgctacaatgccggctcctgcccctgcgttgattccgagaattccaggatcagcaagcccgtttctcgtgatggcctggataacagcgcctgcaatgccaagaccgagtccaataatagcagccatgacaacccgcggcagccttaaatcgaacagcaaaatttcatactgcggattcgggtagatttgaaaaagagtggagagcagctcagcaggacgaacagaaaatgatccgctcgttaagctgaaataactgacaacaagaatcaaagcgatgaacaatgcatattttttagccattttgctcccctccttttcgtttaattaaataaaggaagaaaggtacgccgataatggatgttacgacctcaatcggtgtttcaaacggatagttgataaatctgcttgcgagatcacacagggttaaaaagattccgcccaaaatacaggagcacggaatcagcctgctgtaatcagagccgacgagaaatctcgtgatatgcggaacaaccaatccgacaaacgcaatttttccggccagcgctacggcactgccggttaaaatgatgacggaaagcatcgccatgattttaatggtttttttcttttgccccaggcttttagaaatgtcgtcccctaatgatacagcggttacctttttgctgagagaaatggccattataatgccaatcaggaaaaacggagcggcgagcttcaggaaatccggactcatttgatgaagtctggcactgtaccagaaactgagatcctgagaaatttgaaaataaatcgacatggccgctgataagctgctgagcagcatgcttgtgactgtgccgatgatggcgagctgcacgggggtaaatccgtttggcatcatggcggcaaggccgaatactaacacagctcctaacgctgagccgataaaagagtatatcatcatttcaatcgaagatgattgcgggagcagaaccatgcaaagcgtaatgataaacgctgaaccatctgaaacacccataatggatggcgaagctaaataattgcgcgtaatgccctgcataagcgctccagaaacagcaagggctgcccctatgagcagagcgccggcagcccttggaatccgggaatgccatataatttgatggtctgtgtttcccggatcgaaatgaataagagatgtaaaaacaatatctgtgctaagatgctttgccccataaaggattgaaagtaaaagtgacagcgctatagcaaatggagaagtaatcaatatgatacgtgtccactgttttgaatacatacaaaaacctactctgaattagttttgtgtcaatttttcagcagccgctttcaggaaacggactttgctccaagctgtgccgccttgtgcgagagggtccactgagttgacatacacatggtcttctttgactgctttaaggcttttccagattggatttttctctaaatcttttaaggcatcaggtttatctgcattttcatcatcagaaaattggacgaaaatatggtccgggttcatttcacttaatttttctaatgaaatcagctcttgcgcttttgcagcttttacttcgttaggcgccttaaggcctaaatcaccgtatagtgtggagttgaaatacacctgttcagggtaaatgtaaatgttgccttgtctaattctaatgacaagcgcttttgaatctttcgctttatcgttgatttttgtttttgtttcttttagatcttgttcatagtctgcaataattttctttgcttttttctcttttccggtcagctgggcaagcagcatcatgttttccttccagtttgaagagatatgagaaactgggatcgtcgtgcctgctgtgctgattttttgcagcgttttttccggaaactttgttgaagcaaggataacatctggcttcatttcaagaatcttttcaatatttggctccattttttctccggttggttcggctttatcagtgatgtctttgaacatatcagggaatttgccggagaatgaaattgcgccttgcggatgaacgtcaagcaatttcgcgtcttccattgattcaacgcttcccgtaatggcgattttgtctgtcggtacagttacttcatatgttttatcaagatattcaattttcttcttctcagatgctgtgccgcttgccttgctggcagttgattcatttttgctgccgcaagctgccgccgtcagcgcgagaagcaagattaataaggtaagagatatctttttcatctatagagcctcctgttcaattgataactattatcaattggaattatagagaatgaacagatataacaccatggacaaattcctgatttatcatggacaatctccggatagtaaagaaacagtttgctgaacgatgcgttcgtgcccgcaagctgagtattcattccacgggtcaagggatagaagataaacacggttatctcgtaccgcgcttaggttttgccatgcttctgtctgctgtaattgctggtagtaagctatggtctccggctctttaaaaagaaaaagcatcatacagtcagcttggtaatttgcgatattttctaacgaaatcgcttgttctgaaggtgtgtcagccgttgttgccgagctgaatcctaaatccccaaagaaaacttcgcggacacttcggttatgtgccagatagaagttttgcttatgcagcctcaaaaagagaaaacgcagcccttgaacgtgctgaagtgtttttttggcggctgttgtctgctggtcataatccgctagccacttttctgcttcggactcctcctttaaaaatgaggcagtttgcagaaagtgggttctccagctttcttctgaaggaaggtacatgacttctgcgatgcgattcaggcgatcttgttcttctggagaaatagaatccatgctgacaatcacatctggttctgcctgcgataacgtgtacaggttttcttcccacttttcattaaaccggtatgcactgagctggacgggtatatctgtcgaataatgctgatagtagtaagacgtccatttcggatgcagagcggccgcaaaaggtatgtggtgaagagggatgagatggcccattgtgccccttccgtatgcggcgattttctttcggcgttttttcatatagcttgtaggtgaacagcctgtatattttttaaagattctgctgaaataaaattcatcttgataaccggtttggtgtgcgatttctttcaatttgcagtttgattttgccatgagccgttttgcctttgtgattcgtgttttcgtaataaattctgttacgctctgtcctgtccattttttaaagctttcactgtagtgtttggcactgattcctgccatttgcgacagctgggcaagcgtgatttttgtatcggcatgtgtttcgatatagtgttttgttttttcgattgctgaatgtgtatccgtttgatcagataaactggcagtaaaaagatcataaatcaggctttgtacttcaatcacacattttagctgagaaagctgagacgattcattccatagtgcggcaagctcttgaagccggactgcaagattttcgatatgtgaaacattcataagcttcagtttggctaattccgattctgtgcacggtgtgtaaatatcttggccggcttccttgatatagctttgaagcctgatcagacaggcatctatatgtccatcggctgctggcataaagccaaaggtctcgttaggcggacaaacataaagtgtctttttttgcagaggattggtgtttgttccgatcgaaatatagccgtttccttttaaatgaaaaatcagcacgaatgaatcggctaattgctgttctgagaagagatcacttgtcttttttagatattcaatttgtatcggttgataaatcactgcattttgcacgagtagaccaccttttcagaagctttcaattgataatcattttcaataaaaattgtaccaaataaatgaaagttttcctatataaagcgggtgggtttttagcatgaaaaaaacccttacttatgtgtaaaagtaagggtctttcgttcagtaagaatatgttacacgtgtaacatacgatgcttacgttctaataaatgagatatttttttcttgttttgctgaattgttggagtgttttttcatagctgtttatgatgccctcaaccgaagttccattttcaatttttgtcctgatccagccgttgcctgccagtttatcgaatgaacctgttgacaggaactcaaaatcctcaggatagagatcgtgtatggttttaatgactgaaagacccgttttaacggcttcaaacttatctctgtctgtcacatagagctgcacaccgtggcaaagcgttccttgatgtttagaaaacgtcggtgtgaaggatgctgccctaaatgttacgcccggcaaatggaggctgtttaatgtttcttcaagttctgtgcttttgataaagggagctccgatcaattcgaatggctttgttgtccctcgcccttcggatatatttgttccttcaatcagcccggttgcaggataaacaaatgtgctttccaccgtcggcatgttaggcgaagggaggacgaaaggcaatcgggtatcgtcaaaatccatttttcgtttccagtgtttcatttttaccactgtaagatcggcatcaatatcaaattctttgttgaacagtaaagccaattcgcctatcgtcatcccatgcttcaatggaatgggatacaatccgacaaatgaggcgtattcaggttctaagattggcccttcaatatgattcccgccttggggattcggacggtctagcaccataaatggaatgccgttttctttagcggcttccattgcgtatgccattgtataaatgtacgtgtagaaacgggtcccgacatcctgaatgtcaaacattagaatatcgacatttttcagcatttctggagtcggttttttcgtttttccgtagaggctgtatacgggaaccccggttttttcgtcaatgtaagagcctacttcgtctccagcctgggcgtcaccgcggacgccgtgttcagggccgaataaagctgtcagtttgatatctgggttctcgtaaagaatatcgacactgcttttcagagatgcgtttactccggttggattggtgatcagtccgatgcgttttcccttgagctgttttttatagtctggcaagagcgtgtctatcccagtctggactttaggttttttagccgtttgattctttgaatcgggtgaagcagaggcagcggttatcgttccgaacatcatgagccctgtcagaaaagcgaatattgtttttctcatgtgtccctccttattaaagcggtcttcccgttttgatatttaatccgtagccatatggataaagggtgtcccccgggttcgtgactgatgggatgttaactggaagtgtgcctttaggttttgcctggccgaaaatcgccatcactccggccggaatattaggttgaagataacggccatttgcgtatcctttaaagccatagactgcaatcagtgcctttgcttcttcgaaattggcggcatcatatgggttgcgcaggctcattaagacaaatggtttgttgtgctgcagtgcggctttcatgacagctctcggaaacacggtggcccatttgcttgaatctgatattgtgtcgtcgatgacaccgtcgttgacgacagggtcatttttgacgacataggagccggttatgatataatcagccttttttacttgttttgcatgctcggcattaaatacttggttggcaaaattcattttgtcgacagatacgggtttgattttctttcgcttgatgagatcgtgaatggtttgttcgattgaagcagtttgttcttcgtaaggtgccacaattaagattcggctgccttttttaggcttgaacggcaaagtgtgctgttcattttttaatacagttactgctttttcagctatttttttctctgttttcaggtgctgctggcttcctacgatttttttggctttggctattttttcttttgtactgtcgctgtttcgtgctggatacatgccgcgttttattttcagggaaatgattctttcaactgatttgttgatttgttgttcaggaatatccccgtttttcacggcttctttcaaagcttgaatgacacgtgcgaatttctgttcttctttcattgaagtgactgaggctggcattaatgcaatatcgacaccagcttttacggccatgaccacagcctcctcctgtccgaaatgatctgcaattgccttcatattgagcgcatcggtaacgatgaccccattaaagcccatttcctgacgaagaagacctgtcatcactttttgcgaaagtgtagctggaaccagaatgtccgatccatcgagtttgcttttgtatgtggtgtcgtcgaaggcagggaattgaacatgggctgtcatcaccatatcagcaccagcatcaattgctttttgaaaaggataaagctcgacctcacgaagccgttcttggccatgggaaacgagcggcagtccataatggctgtcaacgtccgtgtctccatgtcccgggaaatgtttgagggcagacgcgatatcctgccgctgcaaccctttcatcgtatatagaccgaggcgtgatgtcagttctcgattggagctgaatgaccgtacgccgattacaggattatcaggattattgttaatgtccacgacagggctgaaatctgtattgatgcctaaggcagagagctctttcccgatgatgctgccggtctgatacgcattgattctgcttctggctgcgcccagcgccatattccctgggaaattagtgccctcccctaacctcgttacaatgccgccttcctgatcaatactcagcatgagcgggatttttggacttgccttttggtaatcgtctgtcagttggacagtttgttttgttgtttttacattttctgcaaaaaggatgatgcctccgaattgatatttcttgacgaggctggcgacttcatcattcatttctgtaagggcttgcggagaggactcgccttccttttgccaatttctaaaatcaggcatcagcatctggccgagtttttcatctaacgacatacgattgacaatctgattggcatcgattgaacgtttggatgcagaggcttctgtctgtctggccccgaaaaagcatgaaagaaagagaacggctgaaaggataagcggaaagacaggtctcatagaaacttcctcctatcgtctaatcattcactccatcgcttcataaatcgcggttatgacacttccataactgcctgttgcaaattgatcaccctcaaagacgtttggattttcttccggatcaataactggtgtatgctttttatttgttaacaatgcgatgcctaaattgtatgctggatcaataattgtaactgtccctgtccagccggtatgcccgtaagcattttcactggcatgagggccaaacatccattccacgcttttacttccgttccgcctccagccaagagcgaatgtcgggtctgttgctgaaggtgctgtaaacaggtcggctgttttctgatcaaataaagaaatgtttcggtatgaacctttgtttaacatgacttgcagcagtatggccatatcatctgcatttgagaacaatccggcatgcccagacacgccatccattgagtaaaacgctttttcgtcatgcacctctccttgcagcgtgtttgtgcggatgttagggaattgaataacgccgtcacgtgtattgcccattcgttcagtagctgcgaactgtttcggtttaaagcccttttgcagcggattgtacaaggtatgcttcagcctgagcggtttgtagagctcttgctccgtgtagacatcaagcggtttgccagtgagtttttcgacaatacacccaagtagaatatatccaatgtcactgtatacgtgttttgtcccggtttgataatcgagcggaattttcgtcaaatattcaatcgttttgtcccgttcttgggaatagtacttaccggctttttccggcgtgtaaaagtaaaagcttgatgggagtcctgattggtgctggaggacatcgatgacacgtatcttgtcttttccttttatgaggtcacccggctgatccttgaaacccggcaaatatgcagaaactttttcatagacgtcaagttttccttggctgactaagcgctgcaatgcaaaatttgttgcgtacatttttgtatttgaggctaagtcaaacatcgtgcgggttttcattttggccggacggcgcagcagttctgatccttcgtactttttactgtagccgtatgctgctttttttatgatgcgtccatccttcaccaccacaagaacggcgcctggaaatcctgctgcaatatcccgttctatcatctgatctaccttctttagcttcttcgtcgagaattgtgcagtttctgcatttatggttttcggctcaaccaagttgtctgctgtttgtgcgaaggtttcatttggcgcgaatatcgatagggttaaaatggcactgaatatgaacagtgtctttgttttcacaggctagcccctttctgtgcttctatcccgtttactatccctaaaacagaaacaatttaatcgaactgagaagccatttcatctttatatccgaatgcataggtcaataaaaagccggccgcgtaggaaataaagagcccaacgatatacaggatgatttgcgaaggcaggactagaaaggaaagcggcagtccggagacaccaatcgcaatggtggctacttgaaaataagcttgaaaggcgccgccgattccagctcctaaacatgctgttaaaaacggacggccaagcggcagcgtgactccgaaaataagcggttcaccaatgccgagcagtcccgatggaagcccgccggcgattgctttcctcagtgttgtttttttcgtcttcacgaaaacggcaaaggccgcgcctacctgtcctgcacctcccatagccaaaatagggagcagaggatcattgccaattgaattgatcagttccatgtgcacaggcgtcaagccttgatgcagtccggttacgacgagaggaaggaaggttgcgcccagaataaagcccgcagcgatgccgccgatgtccaggatggacagtaggccggatgtaatagcatcagaaatgaatccgcctaaaggcataaatacgacatacgttacgattccggtgattaacagtgaaacggtgggtgtgacaatgatatcaagtgattgaggaataaaacggcgaataaattgttcggtgtaagcaatgaatatggctgcgaaaaggacgccgatcagacctcccctgcccgggagaagctcttctccaaataaactgatttttgcgatctccggattgataatcaagatcccggccaaagccccaagtgcgggtgtcccgccaaattctttcgaagcgttaataccgacgagaatgccgagataagtgaacagccctgatccgatgactgtcaggataatcgcaatttgtgagtctgcagagagccagcctgcttgaataattgctttggtaatcccagtaattaaaccggaagcgactagagcgggaataagagggataaaaatgctggcaattttacgtaagaaaagtttaaaaggagtggcatttttccgattgatatcggctttctttttggccgctgcttctttgacatcggcaccttcttctgctgacacgagctttgagaaagcagctgtaacatgattgacgactcctgtgccgaggataatttgtaaggtttcagcttcaacgacccccaatacgccgtcaagctttcttaaaccctgagcatctgctttgctttcatcgtaaggcgtaatgcgcaggcgtgtcatgcaatgcgtatatgaagaaatattggattttcctccgcatagctcaaggattttctgtgcgagatgatggtagttattttctttgctcattaaaacccctccccttcaagatgccttatttttttctcatagattggatggctgctctcgttttatcgatataaccggttgtcgtttcatactgctcagccgccatgcctaaaaacaaaacatcaattataaaaagctgggcgaggcgggaggaagtggccgcacttcgaatcaaggcttcattggaatgggctgtatacaaagggacatcagccagtgcggagacggatgtctgactgaattgtgtgaggctgatcgttgtgatgcctttttccttggccatggcaaacagttcaatgatttcctgtgtctctcctgaaaacgaaatggcgaatacgatgtcgtctttatctgcatttgcaattaaagatgccacaagatgagtgtctgtaaacgcggttgcttgtttatgaatgcgaagccacttttgctgggcgtccttggcgacaatgccggaagcccccaggccgataaaatgcacggtatgagctttgagaagcagagaaaccgctcgttcaagctctttgtagtccatcaggtctgaagtatcctgaatggcttgaatggcattgccggccgttttttcggaaatggagggcagcggctcgtggggaacaatatcccggtagccctgaaacgtaggctttgccagatcgcccgctactctcatttttaaatcttgaaatccttttaaaccgagtgatttgcagagcctgatgacggcagcgtcacttgaattggctaaggcgctgatttcgttgaccgtgctttcgattgctttgtggggatgggctaggatataatctgcaagtttgcgctcggatggagggagcttatgcttcattgattggatgatggctaaaccgcctgtggccattctagttctctccttatcatggatggtaatgttcgattgctttgtcaatgaaaccgtttgcttcatcgagtaatgtctttgcttgtttctgatctgtgcttgttttgagcatgacgattgctgttttgacgtgatgatcggcttgttccagagtgtatctggctgtgtcgtatgaagcgtttgtaaggctttggataatgctgatggcgcgttcttttagttttttgttgctgacgttgacgtctaccatcaagttttcgtaaaccttgccgattttgaccattacagcggtagatatcatgtttagaatcattttatgagcggttgcggctttcatacgtgttgatcctgtaatggcctcaggtccgacgacaacctcaatgctgtgatccgcatccttgctgatggcggaattttcattgcaagtaagggcgatggtgtgtgctccgactttgcgggcgtatcttagggcgcctgcggcgtagggtgtgcggccgcttgctgcgatggcaatgacggtgtcatttgaagtgagctgtatgtttcttaaatcttcagctcctgcttcatcactgtcttcaatgccctctgctgcctgtaaaaaggcttcggggcctccagctatgattccgatgacctgatctgggcttacgctgtaggtgggaggacattcaacagcatccatgacgccgagtctgccacttgtgccggcgcctgtatatatgagccggcctccattttgaaacgattcataagcgcagtctacagctgttttgatgtcggggagaacctcttgaacggctgcagcgactttcatatcttcgttgttgatcattttgaggatgccgagagtgtttgctttgtggatttcaactgtttggctattgcgtgattccgttgtgagacggtgaaggtttaatggttctgacatgaggatgccccctgttttaaaatgatatatctcaatattcagtatattcatttctgttatgatatttcaactatgtttttgaatttttgaaattttatttcactcaagtctataagaaatgatgaaggatcaactgttctccaagcgggccgattcttcgccgtcctttatcaaggaacccgcttttcatataaaggtgttttgcgcgtatgttcagatgattgacggccaagatgatttcgtcgcaccatggaaaatatccgctcacaaaagcgggaagcaaaagcatggcttttttcgcatagccttttccgtgatgcacagcgtttaaagacagggagctgagcagtaaagcaaatggattgttagaataagaagcaagcgtttcttttgatgcatgtaaaatgaaaaaaccgactggaaggtcgtcttttaagatgacaaccgggtatcggtcctgtatgcccagagcctgagacagcacctctttcgggagggaggtaaagcgtttgtcatcgttggtgagcgtgaatgattgaagctcgggcaagtgttcaggcttatagaaggataaagaaatgtcttgagtcatgtggtggcctccttacaatatgtcgtcaagctcgttttccgaaatgacgcggtagcccgcttgttttaacagtgcggcggttactccgctgccggtgatttttttaccagagaatgtgccgttatagataaaaccgcttccgcaagatggactgttttcttttaatatgacggcagaagcgttgatttcttttgcgtaagccaatgttttcgcggcgccttccatatatagttctgtgacgtcttctcctgaagctgtcacgattttcgctgttccattgagaacatcctcgccggtgcctcctatgatttctgcgggttcgcgtggggtagagaagccgccgagaagttcagggcaagccatgactgctttcttttcatcgacgagttttctgattttctccgacgctgcgtgagagccgttatatctgcattcaatgcctccaaggcaagaactgactagaatcatattgggttctcctctcttgctttacttgtctctatcataaaataaatggctttagttgggaggctttttcagttaaaaaaggagttaaaaagtttgaaaataaaaaaattaatttttctctttacaaacagggagtgacctgtatataataacttttgtcagctcgacgagaacacaacggcccgttggtcaagcggttaagacaccgccctttcacggcggtaacacgggttcgaatcccgtacgggtcaccatttggaggattagctcagctgggagagcatctgccttacaagcagagggtcggcggttcgagcccgtcatcctccaccatcttgccggtgtagctcaattggtagagcaactgacttgtaatcagtaggttgggggttcaagtcctcttgccggcactgttttttcaaaattttatgtggaggggtagcgaagtggctaaacgcggcggactgtaaatccgctccctcagggttcggcagttcgaatctgcccccctccaccattattgggctatagccaagcggtaaggcaacggactttgactccgtcatgcgttggttcgaatccagctagcccagtcacagacacctttgatcaaaaggtgtcttttttcttttcgggaaaatcattccaacttctaactgttcagtctgtataataattttaaaaatatgttaaggtagtttattcacgaattaccatctacaccctgccaaaaatttgataaacttattttataaaaaaattgaaaccttttgaaacgaagctcgtatacatacagaccggtgaaggcagaggttagataaatatggaaatgatgattaaaaaaagaattaaacaagtcaaaaaaggcgaccagaatgcatttgcggacatcgtagatatttacaaagataaaatttatcagctttgctaccgtatgcttggcaatgtgcatgaggcggaggatattgcacaggaagctttcatcagagcgtacgttaatatcgacagttttgatattaaccggaaattttcaacttggctttatcgaatcgcgaccaatttgaccattgaccgcattcgcaaaaagaagccggattattacctcgatgcagaggtggctggtacggaaggcttgaccatgtattctcaaatcgccgcagatggtgttttgcctgaagatgcagttgtgtcgctggagctctcaaacacgatacagcagaaaattttaaagcttcctgacaaatacagaacagtcatcgtattaaagtatattgacgaactctcattaattgaaatcggggagattctaaacattcctgtggggactgtgaaaacgcggattcacagaggcagagaggctcttagaaaacaattaagggatctttaagtggggtgatgaaatgagctgtcctgaacaaattgtgcagcttatgcatatgcatcttgatggagatatccttccaaaagatgaacacgtattaaataaacatctggagacatgcgagaaatgcagaaagcatttttacgagatggagaaatccatagcgctcgtacggagcacatcgcatgtcgaagcccccgcggattttaccgctaatgtcatggcaaaattgcctaaggagaagaaaagagcttctgtaaaaagatggttcagatcccatcccgttatcgcagctgctgcggtattcatcattttgatgggcgggggtttttttaacagctggcataatgaccacaatttcagcgtgtccaagcagccgaatcttgtggttcataaccatactgtgaccgtgccagaaggtgagacggtcaaaggtgatgtcactgttaaaaacggcaagctgattattaaaggcaaaatagacggggatgtaaccgtcgtaaacggcgaaaagtatatggcctctgctggacaagtcaccggtcagattgaagaaatcaatcaattattcgactggacatggtacaagatgaagtctgcggggaaaagtgtactcgatgcattcgatccgaacggagaagagtaaagcgcgttagccgctttgctctttttttgtgggctgagagggctggcacatttcacttgctaaatcgaaatgtggtataatgggctcgctatgtaaagtacatatgcgtaacacgtaaaacacaaaatacgaaatgactgaaatcttggaggacgaggaaatggcttttgaggatatcccttttttgcagtacctcggcaatgccgttgatattctccttgtttggtatgtgatatataaattgattatggtgatacgtggcacgaaagcggttcagctgttaaaaggaattgtagtcatcgtgcttgttcgtatggccagccaatatttgggcctcagcacacttcaatggctgatggaccaagcgataacatggggatttttagcaattattattatttttcagcctgagctgagaagagcgcttgaacagctaggccgcggccgctttttttcgaggagcggcacgcctgttgaagaagcgcagcagaaaacgattgaggccattacaaaagcgatcaattatatggcgaaacgccgtataggcgccttgcttaccattgagcgggatactggaatgggggattatattgagaccggcataccactgaatgccaaagtcagctctgagctgctgatcaatatttttatcccaaacaccccgcttcatgacggtgcggtaattatgaaaaataatgaaattgccgcggccgcctgttatctgccgctttctgagagcccgtttatttcaaaagaactgggcacgcgacacagagcggctgtcggtatcagtgaagtaacagacagtttgacgattattgtgtctgaagagaccggcggcgtcagtgtggcaaagaacggcgaccttcacagagagctaacagaagaggcgctgaaagaaatgcttgaagccgagtttaagaaaaacaccagagacacttcttctaaccgctggtattggaggggcaagaaaaatggataaattcttaaacaaccgctgggctgtgaaaatcattgctctgcttttcgcgctcttgctttatgtggcggttaacagcaaccaagcaccgacgccgaaaaaaccgggtgaatctttctttccgacatcaacaactgatgaagcaactctgactgatattccggttaaagcgtattatgatgatgaaaattacgtcgtaacgggtgttccgcaaacggttaatgtcacgataaaaggctcgacaagcgccgtgaaaaaggctcggcagaccaaaaactttgaaatatatgctgatatggaacatttgaaaaccggcacacataaggttgagcttaaggccaaaaacgtgtcggatgggctgacaatctcaattaatccgtctgttacgacagtgaccattcaggaacggacgaccaaaagttttcccgtagaagtggagtactacaacaaaagcaagatgaaaaaaggctattctccggagcagccgattgtcagtccgaaaaatgtgcagattaccggatcgaaaaatgtcatcgataatatttctcttgtaaaagcttcagtgaatttggaaaacgcagatgaaacgattgaaaaggaagcgaaagtgactgtctatgataaagacggaaacgcgcttcctgtcgacgtggagccctcggtcatcaagattaccgttccggtgacaagcccgagtaaaaaagtgccctttaaaattgaacggacaggaagccttcctgacggtgtcagcatagcgaatattgaatccagccccagtgaggtaacggtttacggctcacaggatgtgttggattctcttgaatttattgacggcgtcagcttagatttaagtaaaattaacaaggattccgatatcgaggcagatattccgcttcctgacggtgtcaaaaaaatctcaccgtcaaaggtgactttgcatatagaagtcgacagtgaagcggatcagaagttcgagaatgtccctatcaagactgtagggctgagcagctcacaaaacattgaatttcttgatcctgaatcacaagcgatagatgtaacggctaaaggctctcccacgaatataaaaaagctgaaaaaatcagatattgaattgtatgtgaatgtttcagatttagaggacggggagcatagcgtgaagcttgaagtgaacgggccacagaatgtaacttggtccttggggcgtaaaaacgccaaaatcaagctgacgtctaagaaaagcaatacatcaacgaatgataacagcagcaatacatcagggaaccaggacacagataaacaaacaaatgatcaaaagaacaatcagcaagaagatacaaagaacactgataaaaacaacaacgatcaaaaccaagacgaaaataaagatcaaaaccaagatcaggatgaggatgaatccactgcgaattcacaatcctcatcggaataaaaaaggagcgattataaaatgggcaagtattttggaacagacggtgtaagaggtgtcgccaatagtgagcttacacctgagctggcctttaaagtcggacgtttcggcggttatgtgctgacaaaagacaaacaacgtccaaaagtgctgataggccgcgatacacgcatctccggccatatgctggagggagcccttgtcgccggacttttatccattggcgcagaagtcatgcgcctgggtgttatttctacaccaggtgtatcttatttgacaaaagcgatggatgcagaggcgggcgtcatgatttccgcttctcataacccagtgcaggataacggcatcaaattctttgggggagatggatttaagctttctgatgaacaggaggctgaaattgagcgcctgatggacgaacctgaggataagctgccaagacctgtcggagcagaccttggacttgtaaacgattattttgaaggcggacaaaaatatctgcaattcttaaaacagacagctgatgaagatttcacaggcattcatgtggcattggactgtgccaatggcgcaacgtcatccttggcgacacacctgtttgctgatttagatgcagatgtttctacaatggggacttccccgaacggattaaacattaatgacggcgtcggttcgactcatcccgaagcgctcagcgcgtttgtcaaagagaaaaacgcggatctcggccttgcattcgacggtgacggcgaccgcctgattgctgtcgatgaaaaaggaaatattgtagacggcgaccaaatcatgtacatatgctcaaaacacctgaaatcagagggccgtttaaaggatgatactttggtttcaaccgtgatgagcaacctcggcttctataaggcgctcgaaaaagaaggcatcaaaagcgtacagacagctgtcggcgaccgctacgtagtagaagcaatgaaaaaagacggctacaacgtcggcggagagcagtcaggacatcttattttccttgattacaacacgacaggggacggattattgtctgctattatgctgatgaacactttgaaagccacaggcaagccactgtcagagcttgcagctgaaatgcagaagttcccgcagctgttagtcaatgtgagagtgactgataaatataaagttgaagaaaatgaaaaagtaaaagcagttatttctgaagttgaaaaagaaatgaacggcgacggccggattttggtgcgcccttcaggaactgaaccgctcgtccgtgtcatggctgaagcgaagacgaaagagctgtgcgatgagtatgtcaatcgcattgttgaagtcgtccggtcagaaatgggattagagtaacgaagtctattatcagagagtgaacaagacaagcgaggtttacataagataattgtgagacatacggcaaagttgtttaaaaaacaattgaccgtttatgccacatgttgtaaaatcaagcttgtcttgttcttattttctcaataggaaaagaagacgggattattgctttacctataattatagcgcccgaactaagcgcccggaaaaaggcttagttgacgaggatggaggttatcgaattttcggcggatgcctcccggctgagtgtgcagatcacagccgtaaggatttcttcaaaccaagggggtgactccttgaacaaagagaaatcacatgatcttccaaaaaacatgtaggaggggacgattgaaagtccccttgaaatttgactttcttcgtctccttttacaatcttaggaggaagaaaaatatgtgtggaatcgtaggttatatcggtcagcttgatgcgaaggaaattttattaaaagggttagagaagcttgagtatcgcggttatgactctgctggtattgctgttgccaacgaacagggaatccatgtgttcaaagaaaaaggacgcattgcagatcttcgtgaagttgtggatgccaatgtagaggcgaaagccggaattgggcatactcgctgggctacacacggcgaaccaagctatctgaacgctcacccgcatcaaagcgcactgggccgctttacacttgttcataacggcgtgatcgagaactatgttcagctgaagcaagagtatttgcaagatgtagagctcaaaagtgacaccgatacagaagtagtcgttcaagtaatcgagcaattcgtcaatggaggacttgagacagaagaagcgttccgtaaaacacttacactgttaaaaggctcttatgcaattgctttattcgataacgacaacagagaaacgatttttgtagcgaaaaacaaaagccctctattagtaggtcttggagatacattcaacgtcgtagcatctgatgcaatggcgatgcttcaagtaaccaacgaatatgttgagctgatggataaagaaatggttatcgtcactgatgaccaagttgtcatcaaaaaccttgatggtgacgtgattacacgtgcgtcttatattgctgagcttgatgccagtgatatcgaaaaaggcacgtaccctcactacatgttgaaagaaacggatgagcagcctgttgttatgcgcaaaatcatccaaacgtatcaagatgaaaacggcaagctgtctgtgcctggtgatatcgctgccgctgtagcggaagcggaccgcatctatatcattggctgcggaacaagctaccatgcaggacttgtcggtaaacaatatattgaaatgtgggcaaacgtgccggttgaagtgcatgtagcgagtgaattctcctacaacatgccgcttctgtctaagaaaccgctcttcattttcctttctcaaagcggagaaacagcagacagccgcgcggttctcgttcaagtcaaagcactcggacacaaagccctgacaatcacaaacgtacctggatcaacgctttctcgtgaagctgactatacattgctgcttcatgcaggccctgagatcgctgttgcgtcaacgaaagcatacactgcacaaatcgcagttcttgcggttcttgcttctgtggctgctgacaaaaacggcatcgatatcggatttgacctcgtcaaagaactcggtatcgctgcaaacgcaatggaagctctatgcgaccagaaagacgaaatggaaatgatcgcccgtgaatacctgactgtatccagaaacgctttcttcatcggacgcggccttgactacttcgtatgtgtcgaaggcgcactgaagctgaaagagatttcttacatccaggcagaaggttttgccggcggtgagctaaagcacggaacgattgccttgatcgaacaaggaacaccagtattcgcactggcaactcaagagcacgtaaacctaagcatccgcggaaacgtcaaagaagttgccgctcgcggagcaaacacatgcatcatctcactgaaaggcctagacgatgcggatgacagattcgtactaccggaagtaaacccagcgcttgctccgttggtatctgttgttccattgcagctgatcgcttactatgctgcactgcatcgcggctgtgatgttgataaaccgcgtaaccttgcgaagagtgttactgtggagtaataaatgtttaacccctttggataagattgtctaaaggggtgtttttatgtccaaaagagaaagaacgtctacagtggaaaaatggattaaagaaggtgatgggacaggactcgactatctatcggccatggctatagatttaagatgtttccacattaggtcggtcaatcaggttaaaaggcattaagacttttgcctaactgagttttctaatgttaatacagatataagagagcagttcctcattatgaaacgcttttgatagcagttggaataaagcatgctagaaatccgaaaaccggagagcctattggaatgataacgtgtttttttattgtcaattaataaaggcaaaagaattctagaagtcgcacttacaatgtacttgtgggccttaggttttaaagctcattctttttttattgagtacattccggtttaagttgaaatgattcagtaaaggacacgccataaataaaaggtagcgtatgattgccattctttccatggaaccgatatttctaagatttcatctttcgtaggctttcgattcatattacgtaatatttttatcgaacgaattagacccacatcatcgattggaaaagctgtcgggaacctaaggcagcgcattagaacataattggctgtccaaggaccgattcctcgtattttaattaagtttttttcagcatctttaaagttcattttcattaatttttccctcgataattccccacttgccattaatctggctattccaatgatatattcacttttttttaccgtcattttaatatctgccaggtcggtaggggttaaccgtgcaattcgctcgtacggtgggaacacccaatactttttaccattccattcaatagaatcgccaaatgcttctacaaattgcttctttaaggagtacgcgaaggctaagttaatttgttgccctaaaactccccaacataaagcttcaaataaatcgggaatgccgatcactcgcaacccataaaattttcgggcaggcattttaagtaatggatctgcttttgccatttcataaaatggagttaaatcgttatcaagatcaaaccattcatgaatatattttacaatctcttcccgtttccactgctcaacaggtctagaatcgtttaggaattgaacaatcatttgtttattattgattacgcttacctgcactaaggaccgaatttccccaatggctataacttttgtaatgatattgttctctatttcatacatgcattcatttttttccctggttaggtagccaaggttcgcattcatgtcgaaaatttcaggtaatgtaatgacaataacatcattgacttcatgccatgtcactttttcattctccttatcttaaataattataagaaaactcacgctggttgaaattagtttatcacataataagctttactcattttgttatcttgctattacattctaaccaccttatttttttctatttatgaggttatagtgttagttatcaagaatgctaaacgggagtggattaaaatcgcccaagatataaaaacgtgtgtcgaaaacgtaaattgggattcaagtcaaaatgaattagatgagcattgtaaggaggggtgagataaatgccggatagtatcaataacggacataaagagagccatgatcagagaaccttaaatgatgtagaaatgctaacaaatgaaaagtggcatgcaattataaataatgatgcagcgtacaataatcaatttttctacgctgtaaaatcgacagggatattctgtaaaccatcctgtaaatctcgcgttccgaaaaaagaaaatgtatgtatttttccaaacgcagaacaagctctccacgcaaattttcgcccttgtaaacgttgcaagcccactaatgaaaaaatgcctgatagcgagtgggttgatctaattactgaatacattgataaaaatttcacagaaaaattaacgctagaatcgttagcagatatttgtcatgggagtccgtatcatatgcatcgaacatttaaaaagattaaaggcattacgctggttgagtatatacaacaagttagagtacacgcggctaaaaagtatttgattcagacaaataaagcgattggagatatcgctatatgtgtgggtatagctaacgcgccttattttattactttatttaaaaagaaaactggacagacaccagcacaatttcgtcaaatgagtaaaatggaggaaacgtacaatggaaacaaataaaccaaccctttattggtctttactaatgttcaagaattgggatttttatattgcttcaactttaaaggggcttgtgtttgtaggttcacagaacaaaccaatcgaggaattgttcgaatgggctaagaaacgctttccaggaagtcttcttgttgaagatgatgataagcttgaaccctatgctgttgaaatcactcaatatctagaaggaaagcggaaaaactttactgttccagttgagtacgccggtacgcaatttcagctagccgtctggaatgcactttgtgaaattccttatggacagacgaaatcctattccgacattgcaaatgatataaataaaccagcagctgttcgtgctgtaggtgcggctattggggctaatccggtattaattactgtaccgtgccatcgtgtaataggaaagaatggctcattaactggctatcggggcggatttgaaatgaagacactgctcctcgatctggaaaagcgagcttcatctgaaatggatgttcctcattgaaagtgaatcatctataatgggttggattcttttagaggaaagtaaagaccagtttactgataaacttgacaacttttaaaatttagcatatcttatacgtaacttaataatcgatgcagatgtttatttttccttttaaaatatgtaggcctttagcattcttttcatatttaattttaaatattgataggatgaaaaagtatcctaataaaaaaggaagagaacatgagtcgatttatttgataatcaggactatattaaaggaaatgaaaacatagcataaagtaaagaccaataataaggtagcacttcaaaaaacttcgctgaagttagttgaagtgaagccgacaattttcaggattcaatgatctaacataatcattgaaattttgaagttgtcggcttttttgttggaaaaaaatagagataaataaaaattgaaataaataatagacaaatatgatctgattgaaagatcttttgaccaataatgagttttaaaaaagggagaatttagaatgttagtttcgctgagtttgtcatcattattaacattattttttattatgcttatggcttctgggattagtggactattgtttttacatccgcgagtacccttgagttttgttcgcattcatattgggatcttggctttaccacttttggtttccttactgattcttgccgatagtggtgtgagcggaaatgttggcccttggcacttagattccttagcttgtttaatgactttctttgttcttgcaattggattcatcattcagcgtttttctgtacgttacttaatgggggatcgatcttatcgaaaatattttacgctttttactttcacaacaggagctgcttctatgacatggttaagtggtgatctccgcttgatggttctattttggggagcaactcttgttggtttaaccttacttataaggttaaacagtgcttggcaagtggctagtgaagcagccaaaatttctggccggttatttttgttaagttggttttctttgttttttgcgatgatgtggctttttcatgccacaggtcaatggcagttatcattggttgtaacaaatgaaagtttagctgggctgggagaatgggagagaacagggattcagctattgattgtactggcggtgatcattcctgcagctcaatggccgttccaaagatggttggttgagtctattgttgctcccacccctgtttctgcaattatgcatgcaggtttagtaaatgctggaggaataatactaactcgattttcacctctatttcatggtggtatcgcttcgattattttacttctgcttgctggcatttctgtattgattggaactggaattagtttagttcaggttgattataaacgccagttagtaggctccacgattggacaaatggggtttatgctcattcagtgtgcattaggcgcctatatagcagccattattcatcttattttacatggtttattcaaagctacgttgtttctacaagctggttcagcagtagggcgtcatgaagtatcggctcgcactaatgaaagaacatcctatttatggatcatggctggtcggattttatccttagttataggtgttgctttttggctcactgctcctggagacgggtatcacttaatcagtgcgctgatcttagggtggtcattgtccgtttcttggactcagcttgtcgcttttggagagggccgaattggccgaattgccggcttaactgttttaggaggagcagccctcgtatattttatcattcataaccttttctataagtggctgcatacaaccatttttcaaagtgttcaacctccaatgtcagctgtcatgattgtcgtatgtctcttactatttggcagtgctttaggtacgtgggttgctcgtcatcgttcttccgtttttttcgcggtactctatctttggttagttcgattaggtgaagcaaaaccaaagtcagtagagagtcacccagactaccttaaacaatatatttcataaggagctaatctgagatgggcattacatccgtattaacgaaagataatgtaaaaaagatagatacagatattgatgttcaagaaagggatcttaacgttttcattacatctgccagccgagtgattgcgccactttggcctatttctacatttgctgcacgtaatccgtggatgggacttgaaaaccaaccttttgatcaggttgcaagttggttgaaaaacactcgcgatgttgatatatatcctagtgcgtctatgatccgttcagcaaagaataaaggtgagattgatgaagattttgtggaaatggggctgcagcgttggcttgattcacattcctatcacatcccacgggacgtggcagagcgattttgtcatgctgcattaaagttagatcccctgccttccgaccttttatcatcacatgagctggagaaattagtaagtgaatgtagtggattggatcatatcgagaatgtgtttatgcaaccactaagttcgtatatagagaatcaagatggtgaaaggctagtcaatatactagatcatcatgtcattaagtggagtaaattatatcttgatgactctcaagcaggctggacaatgcctaatcgtgaggaaggtttttatcgtgcttggcagcatctcattcaatatgatccagcacttagtaaaaagcagcgagaaagggtaaaaggttggccgaaagaggcacatttggctttacaggaagctttattcgcactagaaatcccagagtcagaaatccagacttatcttgaaggtcatttactttcattacctggatgggcagggatgatgctttggcgctcccagcaatcgagccacgaacatgcactcctaacagaatatttagcggttcgaatatccatggagtgggctcttataaagccatacttacctttgactaatgaacgatctaagaaaaaaatttcaattgctccccttatagcagcttggattcattggggtgggcttacattagaagaatggtcacagatgacggccattgaacaaaacgaatatttatcatttgcctacagctttgatgagaaacttcgcaagaaactttggttagaagcttgggaacaaacgtacactgatcgattaagccagaagatcatctcgaaacaacgtgaaaccggcggtaaaaaatctgcattagctcaattagcattctgcatcgatgtacgatcagaaccttttcgtcgtcatctagaaaaagaaggcccgtttgaaacgattggtattgctggtttcttcggggtgccgattgcaacttgtgaacttggcagtaaacacagtcatgcttccttgccgatcatacaaaaaccgcaaaataaaataaaagagttcgcagatgaggatgtattcaaaaaatacaatcaacggaagcaagcaattcattctttaagccatacctttaaaacgatgaagcagaatgcgctttcgagcttactactgcctgagctaagtggaccttggcttactctgcaaatggtagcccgtagctttgtgccaagaaaggcgggtcgtttcattcgtaatctccgtgaggcttggttgcgcaaacctgatacaaaactctcgcttcatcatgatactacagaggcagaaatacctgtgggttttactgatgaagaaaaagtgaactatgctcgccaagcattaaaaatgatggggttaacagaaaacatcgcacccttggtcgtgatctgcgggcatggcagtcaaagcactaataatccttattccgcagcccttgattgtggtgcctgcggtggagcggccggtggattcaatgctagagttttagctgctttatgtaatctatcagaggtacgagaagctcttttagctgaaggaattcaaattcctgaggatacggtttttgcagcagctgaacataatacaacagtagatgaattacattggctttatgtaccagagctttccgaagctgcacaagaagcatttgaacaaattgaagccgtgatgccgaaagtgagacatcatgtaaacgcagaacgtctagcccaattaccgaatttccaatcgaagctaaaaaatccgaaggctgaggcaaaccgatttgcggaagattggagtgagatacgtccggaatggggactggctcgtaatgccgcttttattatcggtaaacgtgaactaactcaggattgtgatttggaaggcagagcctttctccataattatgattggaagcaggatgaaagcggtgaactcctagcaaatattattgcaggacctggaactgtagcccaatggattaatttacaatattacgcatcaacggtagcacctcattattatggcagcggaaataaagcaactcaaaccgttactgcaggtctcggcgttatgcaggggaatgcaagcgatttgttagccggactgccttggcaatccgtcatggaatcagatcacgaggcctatcattctcctcttcgtttattgatactcatccaagcacctagagaatatgtagaacggttattaaataatgattcagcatttctgcaaaaagttcaaaatggatgggtccgactggctagtcttgatccagaaggatgttgggaaagctggtaatgatgaatctaagcatttatcaaatggatttgttattcaaaataaaaatgataaacataaggaagaggtgtgctgtatgaatgtaaaccaaaataaaaaagtattatttttgacggatattgaaaacggtttggagcctattttacaagaagcgactaacacttctgcagagaatatgttgactatacaaagctatggtgccggtatttcacatccttatggagaaatcatgaggtctgttatttttgcgatttaccaggaagatgttgaggagatttttgtagtaggaacaaaagataagaagacttccgcaggtaatggactaactcaacttgaaacaatgaaagataaaatacaaacattggattatctttttcaaaattgcaagcctgaatttttaggtggtacggtcgatgaatggctaaatgaaaatagcagtgacaccattgaaaaaagtgttgatatgattcgacatcatcccctagtgccgtcatatgttaaagttagaggtttattcgttcatcataaggatggaaaaccctcaatcgcggagggtcctgatgctaaaacaggtcaagccatacctgatcattgcttgtcacgatgaaatacaggttcaacttctaaacgcacccatatatggagaaagcagttctaaggagattgtatgagcgctaatttaactgattttgtcacgaaaacaatagaggacatgaactcgtttgatcgtgaaaatatggaatttatgaaaaaactaattagaaaagcaattgatttttatcatctaaagtcttatgaagaagttgaggaaacccattcaggaaatgttcgatttttgcatgtccactctatgatggaagaaaatatgttatccaaaatgatagtggtcacaagaaacggtaaaactgatttggatattgaaggtgtatatgaaggatatgttgtaagagaatattaatgagacgaaatcacaaatagaatatgccaatttttttgctcaggagatgtattagatatgaaaaagtctaagggttctattgaatcagagatcagtaagtccattactcaatgggagaaggattatcttgggcgggggtctgtatctgttaagactgatatactgcgggacatgatcatcgtcaatttaaaagggattttaacaccagccgaatatgtagtttgtggatcaaaagagggtatgttatctatcaaacaaactcgttcggagttagttgaatcaggtatagaaggccttaaggatattatcttaaaaataaccggagaaaaagtgaaaagttttcatactgatttaagctcccggacaggtgaacgagtgatggtatttaaattatgtaatgatctagagaaaaatttggaaaagatcttataatctaaagaaaataaatgttaagacggtatggaatttgttgtgaattgaacataaagaactgccgattcttttgttttacaattatggtatcattgataacttttattcatatcctaagcggacataaagagatatcaattcatagtacactgttgtgttattcctgtcgaaagatctaacatccgctgttgttatgagcggatgtttttttacatctattttaaatacatgaatttgatgctggtgattagtcacttgaacaatatttgaaaacatccttgtcacctgccgggtttccccaagtgtttagtgacatgattatgagaccaatttcgtaaagcttgctgataaatttaagcggtgaacaaaattgatatgctgtcttcagtttcatttcacggaattagtcagagataaacctttaattaaatatatccaaaaaacggattgacatatcgaaatataacgatataataatcgatatggaaccaattgaagtattcaaagccttatcaaatgaatcaaggctgcaaattttgcaatggctgaaggaaccggatcgtcattttgcaccccatgaagggattgatatgaacacaatcggggtatgtgtcagtcaaataacagacaaattgaaaatgacgcaatcgacggcttcccaatatcttaccatccttttaagagccggcctaattaaggcggagcgtattggaaagtacacatattacaaaagagatgaagaagccattgggaaacttgctgactttcttaaaacagagatataaaaataaacatcaaaagatgtttatttttacaccatacatatcgacatattacgatgtgtttattttttataataacatatcgataattcgtgatatgtttattaataattaaggagtgaatgttttatgtctaacacttggaaaatttatattttagccattgtcagctttttagttggaacctcagagtacatcatttccggaattttggatcaaattgctcatactctcgggatcactttagctgccgcgggccagtttattaccattttttcacttgtatatgctctttctacacccgtacttatggcgttgacagcaagtatggatagacgcaaattgatgatgtatgccctaggtttgtttgtgttcggtaatgtcctggcttttgtattgcctggttatggatggtttattgcagcgcggatcattatggcgatgggagcaggtgtggtggttgtcaccgcattaacgattgccgctaagattgcatcggaagggaagcagggaagtgccatcgctacggtcgtgatgggatttaccgcttctttaatcattggtgttccgcttggaagaatgatagcagtagcattaggctggaagtctgtatttggagccattgctttgttgggattgatcgcaatggtcgttattttctttactcttccgcatactgaaggggataagcctgtgcctttgcttcaacagcttgctcttttcaaaaaacggaaagtggctatgggattatcaatcactttcttctggctcgggggatattctgttgcttacacttatttgtcaccgtatctcttgaacatctcaggtataaacggcaacttgcttagcggtgttttgcttatatttggaattgccagtttggttggatcaaagtttgggggatatagcaccgataaatggggagtgccctttacactcgttggcgggatgacgttgcatatcgtcacactgattcttctgtcacttgtcactcattcctatatcggagtgttggtgattctcatattatggtcgtttgccgcatggtccaccggtccgacacagcaatttcacctggctacaatagaaccggaaatgtcaggtgttttgcttagcatgaatcagtcaatgatgcaattcgccatggcggtcggcgcaggtataggaggggtttttgtggaaaacgtatcattggcctcgattacctgggttggtgcgttaggggttatgattgccattattgcatcattgctgattttcaattcgcaaccgaaacaagcgctaaaagatatcaatcaataatttcgaaagatctaacatccgctcgttatacaagcgggtgtttttttataggctcaagtagaaggcacactgaagctgaaagggatttttgccgacggagagcagaagcacagcaagttataatatactaggaagggaaataacggtatggcagaagggttctagcgcttctcgcctgtaagatcattactttgaggatgtgtcatcgtgaatcaaaagacgtacattgaaatgagcaggacatcgcagtacatcaacaaaatgagagagtattcagtgctaattgatggggctgagatgggaactatcaaagatggaggaaggctgcgaattgatttaccgcctggtgagcatgttattcaagtgaagattgcttggtgtacaagcccaactttgaggtttactttagcggaaggagaagtgttgaagtttagatgcggaagtccgcttcgaggttggaagttgcttttggcacttttttctgttttgggccgtcctgaaaattatctgtttatcgagcaggaagaagagaaaaaagctttgtggtgactgtatgttactacatggataaatatcgctgaattctgttttgtgaaagtttaattgacataagaaagaatggcagccttctcaatatcgtgctccttagagcaggctgtcaataaggaattctcggttgtcaattttcataaattcattgagaaactaaatactccttaatcaattgccacctgtcacgagcatgcatgatgaactccgatgcaatggctacaaccaggtttttctccggaacacagcaaatcacattcccgccatcgcctagtgctgagtatgagaaaacgccgtcctcatcactcagccaccatagataaccgtagttattggggtttatctctgttgattcgtcaatccatgatctccgaatgatctgttgattgttccaagtaccatggttcaaatatagataaccaaaccgagccatatcccgtggagtcagcgtaagtccccatcctccggttgagttgccgtccgggtacctctcacatgtttaccgaatagatcgtcaaagctgaatgatttcatttcataatgcggaatttctttcatgccgatcggtttaaataagtactcgttggcaaattcgcgggcgcttttgcctgtggtgcgggtgatgatggctgacagcaggtgtacgcctgcggtggagtatttaaatgtgccgatttttcctccttgacccagcataccgagcgtataggcgatccaatctggctgcatgcacatcttatcgagcggttcttgccagtcttcaaatggatagggagctgtcattgtgagaaagtggtgtcttgtttttgtttattaggagtattcgacacattctgggaaagaagcagtgttttccgaataaatccagctccaagaaaccaaatctaataaatggatctataaaaacgttaaaatcaaaagaactaatatatataggctaacgaaagagatatatcattttttgaaaaatagttttgattgcttatagttgacgagtattaagtgaaaacaatccaaaaaagtccctaacctaaattttaaatattaataattagatgcggttagagaaaaataagttaaatatttgaaaaaaatgttgaaaaaagacatataaaatgatattattacctatataagtaattaatttcttaaggaggaacgaaaatgaagaaaaaaattgctgcatttctactattaacaatagtagcgataagcacgataattcctgtcacagtatctgctggaagcggggaaaagtggaactatggttatgacaaaaagaaaatgcaggattacaatgattactaccattggctttatcgtcacaattcgtcaataacaaaaaaaggtataaattatccaggtcgtattgcccaacctaaatattggtccaaattaagactcgattataccggtccttataaagtttcctaccacaaacacgtttacaaatagaaaatttttcaaaagggatttatattataaaatataagtcccttttgcattaagataaataaggagaaaatatgattgaaataaaaaatatgaacaaatcattcaatgaaagaaaaatttttgaaaacttaaatttggttattgaacctggggagtttattggaattattggaaagagtggaaagggaaaaactacactgctaaatataattggcacgttagaaaaagcagatagtggttctgtaaaaatattagatagggatataaatagaaaaagaaataaaagatatttacttagacatcacttaggatttatatttcaaaactatgcattaattgataatgcatctgtgaatgagaatctagaaatcgcacttaaacataagaagatgaatagacaacaaaaaagaactgctatgtcttctgcattaaaagaagttggtttagataactatggtaaagaaaaagttcatactttaagtggtggggaacaacaacgcgttgccattgcaaggctgctgcttaaaaatcctactttgattttagctgatgaacctacgggatcattggatactgaaaacagagatattataatatctctttttcaaaaactacataaacaagagaagacaatcattatggtaactcacgataaagaactaataaaaattttttcaagaactctacaattataaagggggaatagattgtgaaaaaattattattccttctcgttattactacctttatagttgtaagtttcctatcgataaagcaatttgaatatttacagtttcaatcttttaatcataataatgttcatgattcatggaatgttgttatagatgaagggaattctaaaatcggtaaaaaagataattttaaaatgttggaacaaatagcatttgaatctaaagttaatttgcaacgcatatcatatgaaaatgataataataaagataaagtagtgtattatgttgttctctataatgcaccagaatattttaaagatctaaaactaagatatggggaatttttgcaaagtaatagtagttctaatgattttctatctactgttcaaacaaagaataagcatcagataggaacattagagatatttcatagttttgaacctattgaaattaggccaatgattgctgcggaaaaaacaaaagatattaaaggtacctatactgtaataggtgaaaaacatgctgaaaattttaagaaaatcgcattacagcatggtttttcaattaagttatccaaaaatgaagattcacaaagtgtgagtacaccatatccttatcaggaaatgatgtatataagctcattgattttatgcttattaataatgcttacaatattatatgatgtaagtaataactataaagaaattgctgttaggtatatgttgggatgtaatttatttcatataggaatatatctattcagaaaatatattcctatcattataagttccttgcttgttggaagtttaggtttaatattatatttatattggtataatcactatcaacaattcattgagttcgtatattttttatcgaaaaacattgctctgttatcaataatacttacaatcatttttttaataatatggtttagtactggaagtatcaatatcccacaaatgattaaaaataaaaaaccagtaagaatgtttttttatttaaatattattgtgcgctttgtactggcagtttttctattgttaggtttagagcaggggattagcaaatttcaggtgttaaaaagtacggtttcgaatcaagaaaaatggtctttgttaaaacaatattcttatttagggatgatagcttcaccagagcaaaaacaagaaactcttaattttcaaaaagataaagaagagcgaaaaaaaattcaacttttctataaaaaactagaatcccaaggggcgttttttatatatccttcggacttttactcgaatgattcacaaattacatctcaagacataaatccatggggagaagagggaagaaaagtagaaataaataagaattatttatcggttaatatgataaaagatatacatggaaaagatgtggggataccttcctctaataaagatgtaataaatgtgttagtaccaataaaatttaaaatgtataaagaagatattgaaagatcattagcagaagattataaaggtatatacgatataaaacgcgctgctcctgtaaaaataaatattatctatgtccagaataaccaatcttattttacgttttctacaaattcagctcaaaacagtaactataagattgtagatccgattgccgtaatagttaataataaatttgaccctttgatactagctaataatatttctatggggtatggtttttataccaaaattagtgaaggtaaagatcctttcaaaataataaaaagaacattagaggaatatgaattaaacaacatatggagccctgtatctattgcttattcaaatgtcgaattaaaaatagccaatgataaagaagcattacagttaacggctatatattgtggggtatttcttttgttagctgtagtattattaattttttcggcagtttattacttagaaatgaacaaaaagctattatcaatacaatggatatttggttatagcttttttgagaagcattgtttggtctatctctcggtgttggttttctggagtctgacttttatggttagcttttatgtatctggaaatattgcgttattgggtgaaatttccttatggttggcgattttagacatattattaacaagtatattattgattatgagagaatataatgttactaaacaagtcttaattaaagagtgattagtacaaataattgggggtaaacatttttgaaaagaaaaataaaatttcttacgatttgtttagcgtttgcattattatgtctaattatagctgcctattctatctcaacgaataaaccggatgatgaaaataatattaacaaaaatcaagttggaaaaacacaaaaacaagatagttcatattcagataatatggtatctgatcaagataataaatactatgtcatctatataaaacagaagaatggaacaggctcatcatttgtgcctgaaaagcttaatcctggtttcaaaaatgactctgatgattttaacgtaagtatttcctttgatgataaagggaacgtaattaataatgataaggtaattgaagtggaagacttctcactatcaaatactaataagaaaaaaattagaaaaatagttggtacaaataaatatgatgcagctttgaaagaagttgaagatcgagtgttagagactaagaaagaattagaagaaaattccaataattagtaaatatacaattagcagtattgaccgctgtaaataagaggcggtctttttgcttagaattaaatatttactaggtttaatagaaatttattttcatatcgtatccttttcgtattacgtgaaaggagcactatgaaagttgtactgactatagtttaccttctagacggagaataaaaaagagccggataaccggctcggtataagttaaaactgctttgttacgtcgtattcataatctatttttgcttttacgttgctcatcgtcgatctggctgtcgctaatgtattatatttaaaactccatacctttgccacactgagttgatctgacaaagagatatcataagaccctgaagtcgagctgtttacaagagcacggcgccattcgttgttttcgctcgtcatgatcaggtggcgtgtatttccctggcttggtgtttgagtggcggttgtctgaactctggttacaatggcatcacgcggtatcccagattggtttgttaaatcaaccttgatcacgctggagtcagaacctgaggggctaaggcttgtatttcctttattttcagcaatgccgctgaattggaatgttccgctgcctgatttgattcggtcttcaattgaaagtgtaaaatacatgtttccggtataggtgcctcgtgacactttcacataaaaggtatccgtcgtgttttgggcgtctgcatttgcataaataaaagaagaaaacgtattagggttaatgacttctgtcccttgagaaacaggtattctattcttatcataaatttcaattttcatccctgtatacgcgctctggtatgtactcctcacgtatactttttctcccttattagccgtaaaagtgaaataggcttcatcttgaccagcttccagtattgttgtatcgatatttttatatttccaataaccgatcggcattgcggtatcaaatgaattgtttcctgtgatagcagtgactccgacagctgatgccgaatacgtaaaggtgaataagacagacagcataacagcgaatggaataagccattttttcaccatgcaaacaacctccttttatttccatcatacataataacgatttaggtgtaaataaatgttttttgaggttaatatatacattatctttgccgataaaaaagaataagagagaatactcgggagggaattcaatgcgtctgaatcggcaatttatccgcactcagctgatggcacagaacatattgagcaagaatgcgcctgccaaacgggagaatgcgactgaaaatccagcggcagttctggaaaaggcatacagcaggcttaagtcacaatcttcaactgggggaatcaatcagttcaattattctaaaaccagcgtgtcgggaaacagcggggcgttcagcaaagtgtatcaatcagcgaatgatcgaacagtgacagacacaggggaagaaacagtgattcaatcccaaaacccctatgaatctgagagtgatatcagaatcaaaatactagatgaaaaatacagcaggatgaatgcgattaataaaacaaagtctgatccattaggctatattaaggataagtaccaaaattcaaagtctccttatttcagaagtgatctgtcagctgcagaaagacaggccgcttacgataatgaaacagaatggttattcaaagggaaggcgcaaaactataaccttcaggatgctgtgtttcggaatgtcacatttcatggggaagtggaagctgagaatgaaaaggtgtatcagcggggacaggttaaccagcagctgcaagtactgttgaatcgaaaccatattcatattccagaggggacagagctgacgtttacaatcacaccgattgactatcaggtgcgggtaagcgggacagacgatcaggatctgatcaagcaaattgagcaagtgctgcaatctggagacaacagcaaagaactatttttgcacatcatgaaaagccaaagcagtgattcagcacaattttccgaagaggcctatcaaaagtatcaggctgctcgtgagatgtatgaagttacaggctaccatttgaaggatttagaagtgattgatgggcggtacgtcacgcctgagggacgtgacttaatggatgtatataaggaagagcttgaaaaagatccagtgcagaaacaaacggcttcttatgctatatcttactatcgttcagagctcagtaaaatcgcggaagccgggtataatgccattccggatttcatcctatcaattgattacagcaatggatctctgagagatgtgggacaaagcaagagctatgggaccggagataccgggtggcttgaagcattaaagcgtcaaacgggtgtgaattattaggtaagctgttcatgtaggacagcttattttttatgagaatctaaggggtgaattaatcccaatattcaaataattttattatttttatataaaagattttaaaagaagtgaacgattcaaaactctgaacaaaggtgtttgcctgaaaaaaacaattgtattttccagagaaatttattatgatgaaataagtaatttaggagattatataacaattttaagtttgaattttctgattgttatcactgattcatgtgaaggcaagcaggtctgctgttttctcatttatgagtattttgttaggaggaggaagaggagtggcaaataaagaattaaagaggggcctgggcgcgcgccatattcagatgatcgccttgggcggtacaatcggtgttggcttgtttatgggttctgccagcacgatttcatggactggcccatctgtccttctggcttatgcaatatgcggaatttttatcttttttattatgcgtgcgatgggtgaaatgctgtatgtcgagccgagcacaggttcttttgcgacgttcggccatcaatatattcatccgatggcaggttatataacagcatggagcaactggttccagtggattatcgtcggcatgtcagaaattatcgctgtcggttcttatatgaagtattggttcccggatttgcctgcttggatacctggtatcgtggcaatggtgattcttggtgcggcgaatttaatttctgttaagtcgtttggcgaatttgagttttggtttgcgatgattaaaatcgtgacgattatcttgatgattattgcgggaatcggaattattttcttcggttttggcaatggcggagatgcgatcggtttgtcgaacctgtggtctcacgggggcttctttgcaggaggtttctcaggtttcttctttgcactgtctcttgtcattgcagcctatcaaggagttgagctgatcgggattacagcgggtgaagcgaaggacccgcaaaacacgctaagaaatgcgattcaaagtattatctggcgtattttgattttctacattggcgctatttttgtgatcgtgacggtgtatccttgggatgagctcaactcactcggaagtccgtttgtgtctacgttctcgaaaattggaattacggcagcggccggcattattaactttgtcgtgattactgcggcaatgtccggctgtaacagcggtattttcagcgcgggccgcatgctgtatacactgggtgtcaatggacaagcaccgaaattctttaagaagatttcacgcaatggtgtgccgctgtatggcacaattgcggtgctgatcggtttggctgtcggcgttgtactgaactatatcgcgccgccgaagatctttgtctatgtatacagcgcaagcgtgctcccagggatgattccttggtttatcattttgatcagccatatcggattcagaaaagcgaagggtgctgcattagataaacatccattcaaaatgccgtttgctccttttacaaactatttgacgattgctttcttgctgatggttctggttggcatgtggtttaacgatgatactcgtatctccctgattgtaggcgtgattttcttagcgcttgtggtcattagttattatgtgtttgggattggcaaacgcacgcaggccaatttgacaaaaagcgaacaagcagctgaataacgataaaaaagagacattcacggatgtctctttttttatttttcgcgtatggattttccctattttagcaagctatagggtaaagatagcagaaggaaaggtgttcataaaatggatgttacactcggttatttgcgcgaatcactttcgaatcatctagaaaatgaagtctgccagcgtatttgcaagaagatgctggcgaagcgttatgcaaatgaaggggaatttgtaaaagacttagatgataatgaaatgtcttttttgaaccatgtattagaaaaagaaattaagtatgcccagaatgaacaggatcaaaaacgggccaaggaattaaacgaggtgtatgaattactgctttgagaaaggcgggtaagaaatgggagcaattgaacgaagcggatatacatttcagccggagtttagcgttgtccgtcaaaacggagccatccatgtgtaccatcaaggagagtttgtggaagaaatcgaatttgaatttaacggggaatatcccgatcatgatttgattgaagagcttgtgaatcattattgttttgagcatgaaatttagagccctgccgtgcagggctcttttatttaggatgtgatcaggccatactttttcaggatatccacggtgatgtttttggcttttgtgccggaatcatcgacattggtgacaaagacataagagccatgctctgttttgatgaatccgacaaaccatcctaatcccatatctgtcaggcgagttccggttttcccgtagagcgtgtaatgatcgccttcctcttgaatcatcatgcgcttgacggttttcattaccggcttgtcaaatggaagctccttgttagccagtttctccaaaaaagtttcttgttccagcggagatattgtgagcgagctttgcagccaaaactggtcgattcccccgctgatatcctcgttgccgtaagatagtgtatgaagccatgttttcattctttcctcgccgatatctctcgctaatgcctgataataccagattgcggattcgcgcatggccgagccaagcgtatggtcgcggttccatgattcgaattcacgcttgaccccgtcccatcgttttacatcgtattcatctcttacagctttgacctgcaagccgattaaagcgttcacgactttaaaggtggattgcggagtttgtctttgatttgcccgttttctgttatagacaaatgtctgatccttttgtaaatcgtgaagaatgaaggttccatccgtatccttgaattcgtcatcgacattcattctgctgacattcaagtgtttttcatgagcagatgatgctgcgtggacggagaagccgccgatccctgcaatactcagcacaagcacaatatatatccattttttcattttgttctcccctttgttttgattaactaccttttctctctttcgtttgttcttcctttaaaaaataatcaaaaagcgcttaaatttggttttgtaaacaaatactgttactgggtttatagtcggaagataacgtgaaaatagagggtaaaaaggaaggcagggtaagcggatgaatgagcagattccacatgacaaaagtctcgataacagtctgacactgctgaaggaagggtatttatttattaaaaacagaacagagcgctacaattcagatctgtttcaggcccgtttgttgggaaaaaactttatttgcatgactggcgctgaggcggcgaaggtgttttatgatacggatcgattccagcggcagaacgctttgcctaagcgggtgcagaaatcgctgtttggtgttaatgcgattcagggaatggatggcagcgcgcatatccatcggaagatgctttttctgtcattgatgacaccgccgcatcaaaaacgtttggctgagttgatgacagaggagtggaaagcagcagtcacaagatggcagaaggcagatgaggttgtgttatttgaagaagcaaaagaaatcctgtgccgggtagcgtgctattgggcaggtgttccgttgaaggaaacggaagtcaaagagagagcggatgacttcattgacatggtcgacgcgttcggtgctgtgggaccgcggcattggaagggaagaagagcaaggccgcgtgcggaagagtggattgaagtcatgattgaagatgctcgtgccggcttgctgaaaacgactcccggaacagcgctgcatgaaatggcttttcacacacaagaagatggaagccagctggattcccgcatggcagccattgagctgattaatgtactgcggcctattgtcgccatttcttactttctggtgttttcagctttggcgcttcatgagcatccgaagtataaggaatggctgcggtctggaaacagccgggaaagagaaatgtttgtgcaggaggtccgcagatattatccgttcggcccgtttttaggggcgcttgtcaaaaaagattttgtatggaataactgtgagtttaaaaagggcacatcggtgctgcttgatttatatggaacgaaccacgaccctcgtctatgggatcatcccgatgaattccggccggaacgatttgcggagcgggaagaaaatccgtttgatatgattcctcaaggcggggggcacgccgagaaaggccaccgctgtccaggggaaggcattacaattgaagtcatgaaagcgagcctggatttcctcgtccatcagattgaatacgatgttccggaacaatcactgcattacagtctcgccagaatgccgtcattgcctgaaagcggcttcgtaatgagcggaatcagacgaaaaagttaaattaaaaagctctcttcctttatcgaagagagctttttgattacttctttttttcatcgtagtattggacgggatacatggagccttctgataccattttgttgtcctcgatatcttgcgggtccgggtggccggctttatcaactgggaacgtttccatgtctggctgttttgttattttcatcttcatgctgtgaatgaattctcttgccttttggcgatttgacgggtcttttaatagataagaagtgatgccgacagttgaaacagcgagacctgaaagtaacagcttttgtttcatggtgatactcctttctattttaagaatagtgtttcctgtatcattcccgttttggaaatagctaaacctattgtgtttttatcgtttggattaacagtaaattccatttaagaagaaactagtgacttcattcctgtattggaaggtaatatacattgacttattatcgtttcagtcaaaattcgataaatattgacaaagtaaagtaatcagaataataatataattagtaagagaatgtcatcatacatgaaaggtgtttacgatatgaatcaattgcatcgaagaatgggaacgttttccctcatgatggtcgggctcgggtcgatgatcggttcaggctggctgttcggggcttggcgtgcggctcaaatagcaggaccagctgctattatttcatgggttattggaatggtcgtcattttatttattgctctttcttatagtgaactaggttctatgttccctgaagcggggggaatggtaaaatatacgcaatattcacacggttcgtttatcggttttattgcgggttgggccaactggattgcgattgtgtccgtcattccggttgaagcggtggcctccgttcaatatatgagttcttggccatgggaatgggcgaaatggacaagcggtttggtgaagaatggaacgctgactggggaaggactagcgtttgcctctgtattgcttctcatttattttctgctgaactattggacagtcaatctattttcgaaagcgaattcattaattacgatttttaaaattattattccgggtcttacgattggagctttgctgtttgtcggattccacggagaaaactttactggcggtcaaagcattgcgccgaatggctgggcaagtgtgctgacggcggttgccacttccggtatcgtttttgcgtttaacggtttccaaagcccgattaatatggcgggtgaagcaaaaaatccggggaaatcaattccgattgcggttgtcggctctcttttcgttgcgacagtgatttatgtcctgctgcagatcgccttcatcggagcggtgaatccttctgatattgctcacggctggagccatttgaattttaattctccttttgctgatctggcgattgcgctgaatattaactggctagttattgtgttatatgcggatgcatttgtatcaccgtctggaacagggattacgtatacggcgacaacgtcccgaatgatttacggaatggaaaaaaacaaatacatgccgagtatattcgggaagcttcatccgatttacggcgttccgcgacaagcaatgttctttaacttgattgtgtcgttcatctttttgttcctgttcagagggtggggcgtattagcggaaattatttccgttgctacgttaatttcttatatcaccggcccgatcacagttatgacattgagacggacggggaaagacctgtacaggcctcttcgtttaaaaggcttaaacgtgattgcgccgcttggatttatctttgcgtcactggtgctgtattgggcgcgctggccgttaacagggcaggttctgtttattatcctgatcggtcttccgatttatttctattatcaggcgaaggcgaaatggaaagggtttggccggaactttaaagccggcgtctggatggtgttttatctgctggccatgatggtcatttcttatttgggcagtgataaattcggcggcctgaatgtcattcattatggctgggatatggttctgattgcgatggtatcacttgtattctatgtgtgggcgctgaagagcggctaccagacagaatacttaaaggatgcgaaagagataaattctcagctgcttaatggacagtcagaagctgctgccggaaaagaataaaataaataagaaaaccttgcgatagttgtcgcaaggttttttgcttttaataacccttttttactttgtggaaaagatcaggatagttggtgaacactcctgttacgccccaatcaagcaggcgatgcatatcagcttcattattgactgtgtaaggatgaagcaggaggccgtggctgcggatcatacggacgttttcttgatttaaagctttataatccgggcccgcaccgacagcgtatgttttgatttcttccagggcagcatctgtcattgacgccatttgtttggcttccagcaattgaacggtcggcaggtttggctgtaattgatggatttttaccaggctttctttgctgaacgattgaatgatcacctggcctggcttagaatgcttccccagtaatttatgtttctgcaaagaagcgatcagtttttcttccatacctgggtaggtgtcaggcgattttgtttcaatatagtagttcgcgtgctttccgaaacggtctaatacctcttctaatgtaggaactttaaggccgacgtactgcggctttgctttttccggataggcttcattaaaccaagaaccggcgtcaagcttcttaatgtctgcgagcgtatggtctttcacccagcccgttccggttgtggtgcggtccagtttttcgtcatgcatgacaatcaatttcccgtcttttgtcatttgcagatccaattcaatataatcagccttcattttctgagcggtttcgtaagacagaatcgtgtgctcaggcacatatccagaagcccctctgtgcgcgacggtcaggatacggtcaggtgacagcaggtttccttttgacgctgccgacactggcgttaccataaatgagagtaagcccagcgacagaacaaacaaggccagtattctattttttctcatgatttctcctccttatagataagcactacctgtctttcatattaaaaaacggatgtaaacggcgtgttggaaaactattaatcttttatgtgtctttcttaaacatgctctgcccgttttcctgtattccacgtcaaagccaagaagacgatggcaagaatacaggatgagatcagcatgataaagccgccgttccagttaaaacggtccacgacaaagcccataatggcgtttgcgaaggcggatccgccgatgtatccgaaaaatccggtcaaaccggctgcagttccggctgcttttttcggtgctagatcgatcgcttgcaggccgatcagcataacaggtccgtagattaagaagccaatgctgatcagggcgatattgtctacgagcggattgccggccggattcagccagtacaccaatacggcaatgaaaacacccgccataaacaaaacgcctgccggtgcccggcggcttttgaagaatcggtcactgatccagccgcacaagatcgttcccggtatgcctgcgtattcgtaaagaaaatacgaccagcgtgagtcttcaggagaaaagcctttggcttctgttaagtaagtaggcgcccagtcaaccacgccgtatcgcacgaaataaacaaatacattggcaaaagcgatgtaccaaagaaatttgttgttcagcacatattgaaaaagaatttcttttgttgttaattctttttcctgatttttaaaagcgtgttttggatagtcattccgatactcttcaattggcgggagtccgcaggattgaggcgtatcacgaaccaataaaacaattaaaaatgaaatgataatggcgatgatggcagggaagaaaaacacgcttttccaagtgacgaacatcgcgatcccaagagtcacaagcggagcaagaataccgccccctatgttatgggcgacattccagatcgacatttttgtgccgcgttcacttatggagaaccaatgggccatcgtcctgccgcatggcggccagcccattccttgaaaccatccgttgataaacataaaaataaacatgatggtgacgctcgaagtcacccaaggcattgaaacgaatagaatattaacgattgctgataaaaataggcctgtcgccagaaaatatctcggattacagcggtcagacaccattcccatgatgaatttgctgaagccgtacgcaatggacacagcggccagcaccaaacccagttctgttttcgaaaatccctgttcctgcagataaggaatggcaaaggcaaagtttttccgcagcaggtagtagcctgcgtagccaatgaaaataccaatgaatacttgcagtctgagccgtttgtatgccgcatccatctttgaatcatccagtctctcaatatgaggagccggtttaaatatattaagcattaaaattatccccctttgctgtttgtgctggatgtgtggcgtgcctcctttcccgaaaaacaaaaagagccagaaaacaccccttgtcaaaaggggttggattcctggctctcctcatctccatccaagctattaacttatcatgatagcgctttcttaaattatcatagtccggagcgaatgtaaacgggtaattttcaaattgggccttagggaagtaaatattatccttttactaaatgcagttatgtttttttactagtaacataaaaatctggagggaggctgtttaaaggtggatgaattagatatcgcattctttattttaccgttaggaattatgctgctatcgattgtcgggacctgtatttgtaaaaatccgtatctgatgccaatgcttagtttggtgatttctcttgtgctcacctttaccatttttattgaatcatttttgggatgggctgttgtctatagcttggtttctctggctttatcctatatcacattgattgtggtaaggaaaaggaaggaatcaggaaattaaaaagacctcactttctaacatatcgttgactaaggcaactatatgtgattataattggcttagtcaacaatattagaaagtggggattgatttgaaaacaagagaatcatctgtcggattaaaattcagaaagttcaatcgattttatacaaacgtccttggtttccttaatgagcacatttacgacagcccgttttccttaacagaaacacggattttatttgagatttataatacgcctaattgtacggcaaaagctcttcaggataagctggggcttgaccggggatatgtcagcaggattgtgaagcagtttgaaaaagaagatttgatctataaacagaggagcaaagatgacgcccgccaccattatatttttgtcacagaaacaggaaaaacgatttataaaaagctggaggagaaagccaacgaacaagtagaactgatgctgaatgaaatcaaccaaaaggagcagcacaagcttgccgaggcgatggcagagattgaagcgatcctttcacagtcgctttctgccagatcatcagagatatcgattagagattattttctctcggaggatcttcaactccttattgagaaacaaagacaattttacgcggaggctcacggttgggatgacacgtttttagcttatcttcaggagacatttgacgctgaaatcgaaaaaatatggattgcggaaagcggcgggaaatttgccggctctgtcgggttggtcaagcatgatgaaaagacagttcagctcagatggtttctggttgattcggattttcggggcagggggctcggcacgcaattgctggagcatctggttgcatactgccaagacatgaagtttgaccgcattttcctttggacggtgagtaccatggctgaggctcgtccgctctatgaaaaatttggattcaagataagtgaagtgaaacaagaagcgccattatggggacagcagctgacagaagaacggtgggatttggagctgtcatgaaaagactgcattatgcttgggtcatcgtctccgtcaccttcttgatcttattggcggttcagggggtgcggctgtcatttggtgcgtttgtggagccgtgggaacggcagttttcaatggatagaagcaccatctcgctgatttcgacgatgagttttattgtttatggcatatcacagcctgtgattgggcggcttgtggacaaatggggtgctcgggctgttttggcatggagtgcgttactgacaggagtcagcattttcttaacataccttgtgacttcgccttgggagctgtttttgctttacgggctgggtgtctcgcttggagttggcggagcatcgaatgtggcggcaagtgtattggtcgtcaattggttcagcaaaaatcggggactagcctttgggatcatggaagcaggctttggcgcggggcaaatgcttctcgttcccggctcactcatgttgatccattggtttagctggaagctgacggttgtggtgttgggactgctgttaatcgtgattgtctttccggctgcgctgctgatgctgcggaacaatccttcagaaaagaatacagagccgataggcggactggctgcatcagaaaaagaaacagcacccaaaacaacagctctttcagtggccgggatgtttcgtatgaggcaattctggttcttgatttttccgtttttgatctgtggttttacgaccgtggggctgatggatacccatttgattccgttttctcatgatcatggcttttcaacgacagtcacgagtgctgctgtcagtctgctggcaggctttaatattgctggcatcttgctgtccggaattgtagcggatcggtggagcagccggaaaatcctgtgctttttatatgcggtgcgggcgctgtcgatcgtgattcttatttacagccacgagccctacttgcttttaacctttgcgattctgtttggattagtggattttgcaacggtagcaccgactcaaatgctcgccacccagtactttcaaaactactcgatcggcctcatgattggctggctgtcactcgcccatcagatcggatcggcactaggtgcgtatgtgcccggcgtcatctatacggtaacgggtgagtatacactggctttttatttgtcgattggaatgctcgtgcttgcgagcgtaatgaatgtgatgctgagggagcctgcggcggtcacgcgtgacagtgcgtctgtggtagacaagtgatgaggacaaagggaaagcatctctgatttcgagattattcagagatgctttttttgtatttttgttctaatacgaagtcgatcataccgactatgcgggcgttttcggatttttgtttgaagcgttctgaaatttgaacttttcttgaaaatgggtaaacaccaaatacccatattaggccaattaacacaaaaaacatttgtacacccatttctattaaatcattataatgagaactgaaaaaataaatatataacgttattaatgttactgtaaatacgattttgacagtgtgtttgaatgtgagctgtggttcaattaaacacaatttcatttggttaagtgtgaaagagtcttgtttcattaggtacgaaagtaaatcattatcgttttgactgatagggtacaagtcagtttctattttttttgtgatctcctgatatttatgtatattacttttcatacagtatccccccttttttaagaagaactccatgaatccctacaggactcatggagaaacaatattatttaaaaagtgctaaaaatgtacggaagagtactgcagcagctcccatttcaggacctaccgttaatactaatgcaccaataccagcaacaattaagatacctgtacctaccacaagcatgttgttgacaatagtatcccaatctggtgagtatacttcctcagtatctggtaaagtaaagtgcttctgttttattttaaacgtaatcgtagtcgttagtccagttgtgatattgtcaccgactggaatatcaggtgtatagattttaatttgaatatttaaagattcagctgttggatttacataaacctccaaataaccgttgcgtactgataagctgagactatttaaaaggttttgataagagtcgatttgtgacgcagtaagagacgtttgagtgtcgcccaataaacccgtgatataggcacctggtttaccatttgtaatggtaattgtgtttggtgaaccttcacttggtatggttgccaaaagtgaagttgatagaataatatccaattcaggtgatgtgaaaatggtttctgtcgtatcaaattcaaacatcgcgtttgccaaacttgttagattttctaaagccggaatggtagataaaatgtctgtcagtgtacgcagccttgcatcatataccggatcagacggcggatttacattgcttgcacctgagtctcttcctgaaaatccgtctttatcaattccgatgcttccagaaccgcttccgatggttccttcataaaattgatcaaaggcccagttgtttggcataggatagccgagattgccgctaaatcctgttgacatatttgccacaaaactatactttgtcagttctgcttctgatgtacggatacaaatgtttcttggtccgtaaacccctatttcatacttaggtgcggttgaaaatgtctgcatttttgtaaatgctgacttaatctcttggaaataaggaatgattttatcggtcacttcataatcgtatgcatcaaaatcgacagcgaaataaatggtcgtgcctgacggaaaacctaatcttctagcaacagaagcggcactatatgcatctcttgtgccttggtctttgacaaaataagaagattcatagccgccgtcttgataaattgggaaaaccttcaatccggcatcaagaataactgcaagctctttagatgtcagggcttttgatgtgaggccgctgcttgtccgcacatttccggtcaaatatctgccaaccgttttataaccgttattccgcagtgtttgagctttttctgcggttataattgtagcagtgtcacaagcagaagcggcgcgagttgtgtctcctgagcttgataataaagctttaatggttggcatatctgcataacctgtttgcggcaggcacatgaactcttgaaatgctttaacagctgaaacaacacccacaccatatttgccgtcaaactcaccaggatcgaacgattttccgttacaatagagggcgtactgaacaattaagacaaatcctgttcttgaatcgccgggagttaaagtaggacacaaacttgtggtgccgtttccgaaaaatccattggcaacacttgtgctcatgccttcttctttttgcagggcataaataagagctttatttgtatcgcggccatacagtccgtcacaaggcattaacccgatatagtcattgtagtcccgatttaagttttgttgaatctggcgaattcttgaatcacccccagacaccagcttaaaagcgctcatgtctaataaggctttcataattaacgtggtgacaatcccatcctgtgttgtcagtccggcagctttttgaaattcttttaccgcattttctgttttttcgtaaaagacgcctgtaaaaccgccgggattaaagcctttacaccataaagccccttgtaaaataaaattcatgttgcttggttttgaatctggagcttggcgtttaagaggcttaaataagcgctgtgttgtcggcccgaagttatcggctggctctgagatacccaattcaatttgaagcgcccgagtcagaccgtagatcgtatcccacccagttttcccgctttcttcaactgggttatacccatgtttgccgctgtacgtatcgttcagccattgctgtgtgattaagaccatttcatcaaccatttcgattcctcctttgttagattgcgttcatttataggtggcaaacgtaggacaaaataaaaaaatggatgccgttaagcatccattttacatccgttctccaacagcttcgctttcggtttcagctctgaaatgtagaggcctaaaagtgtaagcgcgcctcctagaagagcgatccatgtcatgttttcgtgcagaatcaggacagaagcggcgatcgtgataaccgggaccatgtaaatatacgcactggatttgacggctccgagcacgccaactgaataattccaagtggcgaagcacagggcagaagcgccaattcctaagaaaagcatgttgagtatatttgaagcagatgaaaatcggcttaggtcaaaatggaagtcgaacaaaaataaagcgggaaccataaataataggccatacaaaaatactctctgtgtcaactcgatgatgtggtattcgtaagcgcttaattttttcatgaatatcgagtatccgccaaacacgagagcagccccggctgccatgatgtctccgagtggatttagacgcagtactacattgccgttaaacgtaatcaataaaagcccgatcagtgccgagacaaatccaatcaaaaaagtcagacgcagtttttcgccttcgagcagaaaatgggccaaaaccgcagtgatcatcggtataatggacacgatcatgccgacattggaggcgtatgtataggtgagagctatattttctaatagaaagtataaggttacgccaaataaaccagccccggcaaacaacagctcctgccgccaatttctgaacggaatcatgttggggcggacgaggataagagcgataaagcccatcaaaaaccgataaaataatatttccattggagagaagtcagccagcagaacttttgtcgaaataaaggtcgtcccccaaatcagaatggtcacaatggctgcgatatgccccgaagtttctctttgtatgttcatctgtgaagctccttttcaaaaatcttcatgtattgcttcggcgtcagccccacctgccgtttaaaaaacttcgtcatatggctctgatcgctgaatcctgtctgaaatgccgcatcaatcggccttaccccttgttcaagaagttttttggcttgattaatccggattgtttccatgtagctattaggagtaatgcctttttgttttgtaaatgaacgcaataaatgatacttgctccagcctgttaattcactcaaatcattgagtgtaacattttcggcataatgctcttctaaaaattcacaaaccattttgacttcgtctgatggttctggaacgctgctaaggaacgtgacatctgaataatggcggatcagctcttctaatagatgaagaaacagctcctccttacgcaaagcttgtttttcctcggatatcaaaatatgcaattcctgcaggctggctgtcagctcatggcggaataacacatgctgggagaaataagggagatgcccggcgccagtaatctctttcaccgccttctccatgatatccggcatgacattgatacaccgataatcaagcgtccggccgtcaatctgttcacagctatgcgtgtcacgggggttaaagaggagaagatcacctggattgatgatatattcttgatcctggcaggccagataccgttgccctttttcaataaatccaatcacataataatcgtgaaagtggttcgggaacttttgcataattcccttgaagcggtaggcttctatatgaaggtgtgggtcaagctgcagtgtgcgggtttcgttttgcatgggatgcctcctgtcggtgtggtggtcttggattaagtgtagcatgattttgggggatttcttgtatgatgttgctgtttaggaatagagaaagcagaccgttatttgtctgctttcgtttaagaatttaaaagattttaaccctcaataataattttatcttttttaataaaaatttatttttcaaatatttcagttataatggtttggaacagataggaggggcaaagatgtatcaatcaaagaaggttttattgttaggttcaggtgaattaggtaaagaggtagtgattgaagcccagcgtcttggggtacagacggtggcagttgacagttacgagcatgctccggcgatgcaggtcgcgcataacagttatgtcgttgatatgctggacccagagcagatcagaaccatcattgagaaagaaaatccggatttgattgtgcctgaggttgaggcgattgcgacggatgaattgctgaagcttgaagaggaaggatttcacgttatcccgaatgcccgtgcggccaagctgacgatggatcgggaaggcatcagacgacttgcggcggaaacgcttggacttgcgacagctggctatgaatttgcgaatacatatgatgaatttatacaagcggcagctcagatcggttttccttgtgtcgttaaaccattgatgagttcttctggaaaaggccaaagtgtgtgccgctctgaagcggatttagagagctgctgggagacggcgatggaaggcggacgggtgaaaaacggccgcgtgatcgttgaggagtttatccctttcgaatcagaaatcacactcttaaccgtacgtgcggttaacggtacggcattttgtgagccgatcggtcatgtgcaaaaggacggggattatatcgaatcgtggcagccgcatgatatgacagagcagcaaatagaagaagcgaagcatattgcgaaaacgatcacggatgagcttggcggatacggcctgtttggtgttgagctgttccttgcgaaagatagggtatatttcagtgaggtatctcctcgtccgcatgatacgggtcttgtcacgctggtgacgcaaaatttgtcagaatttgcgctgcatgtccgggcgattctcggctttccgattacagaaatcacacagctttctcctggcgccagcaggcccctcaaagcgccggaagaattagcggattacactgttgaaggattggaaaacgcactggcagtcccaaagactcaagtgcgcgtctttggaaagccgataacaaaagccggacgtcgtatggcagttgcgctttctgctgctgattcagttgaaacggcaagagagaatgcaaagaaagcgttggaccagctaattttaaaatagagtttgaacaggtcttgtcatgggacaaggcctgtttttttctttctccgtaaaagttttatcataagaatcagaaacctgattataatgtaaaagtcttccatcgatacgggtggttgacactaaaggagggagatgacaaaatgaaattagttccaagattcagaaaacaatggttcgcttacttaacggttttgtgtttggctttggcagcagcggtatcttttggcgtaccggcaaaagcggcagagaacccgcaaacttctgtatcgaataccggtaaagaagctgatgctacgaaaaaccaaacgtcaaaagcagatcaggtttccgccccttatgagggaaccggaaaaacaagtaaatcgttatacggcggccaaacggaactggaaaaaaacattcaaaccttacagccttcgagcattatcggaactgatgaacgcaccagaatctccagcacgacatcttttccatatagagcaaccgttcaactgtcaatcaagtatcccaacacttcaagcacttatggatgtaccggatttttagtcaatccaaatacagtcgtcacggctggacattgtgtgtacagccaggatcatggatgggcttcgacgataaccgccgcgccgggccgcaatggttcgtcatatccgtacggtacttattcaggcacgatgttttactccgtcaaaggatggacggaaagcaaagacaccaactatgattacggagctattaaattaaacggttctcctggaaacacggttggctggtacggctaccggactacaaacagcagcagtcccgtgggcctttcctcgtcagtgacaggattcccgtgtgacaaaacctttggcacgatgtggtctgatacaaagccgattcgctccgctgaaacgtataagctgacctatacaaccgatacgtacggctgccaaagcggctcgcctgtttatcgaaactacagtgatacagggcagacagctattgccattcacacgaacggaggatcgtcatataacttgggaacaagggtgacgaacgatgtattcaacaatattcaatattgggcaaatcaataaatacagcaaactagccatattcatgtctattttgtttttatgcgggtgcagttcgcagacgcattcttctcaaaaagaaacgactattcctgtcactcttcatgtggaggatgctaaggggctgccggtcgaaggggttcaagtgacgattgtcaaagcgccctcttcagatgaggagccgagtacagagattggcgagatactcggtaaaacagacaaaaacggagatatcaaatgggataccggcagaaaaggcgattactcagtcgcgttgacgaagggtgaaacatcagtaacccatcacatctcgttaacagaggataaaaaagatcatgccattccattagtcttcaaagaatagcagtttccttgattttaagggaactgccttttttatttattgcaggaaaccaaactatatactggaaatttattatgtgagataataagaaataggtattttttcttacgagacaaaaggggcgttatcctttatatcaatcaaacccggaggaaaaagaagaagatgatacaagattcaatgcagtttgccgcggttgaaagtggtctgcgcttttaccaggcatatgatcaaagcctttctttgtggccgattgagtcggaagcattctatgtttctactcgttttggaaaaacacatatcattgcaagtgggccaaaggacgcaccttcgctcattttgcttcacggaggccttttcagctctgcgatgtggtatccgaatatcgcagcgtggagcagtcaatttcgtacatatgcggtcgatataataggagacaaaaataaaagtataccatcagcagccatggaaacgagagctgattttgcagaatggatgaaagatgtctttgattctcttggacttgagacggcacatctggccggcctttcgcttggcgggtcccatatcgtgaatttcttactccgcgcgcctgaaagagtagagcgggcggttgttatcagtcccgctgaagcgtttatttcatttcatccggatgtctataaatacgctgcagagcttacaggggcaagaggagctgaatcatatatcaagtggatcacaggcgacagttatgatctgcatcctttactgcaaagacaaattgtggcgggcgtggaatggcaggatgagcaaaggagcctgaagccgacagaaaacggctttccgtacgtgttcacagaccaggaattgaaatcaatacaagtcccggtacttctgatgttcggtgagcacgaggctatgtaccatcagcaaatggcctttgagcgggcttcggtattggtgccgggaattcaggctgaaatcgtaaagaacgccggacatctgttatctctggagcagccagagtacgtcaatcaacgcgtcttgtcctttttatgcgggggataaaatagtaaggaacatgaaaagattggcattcatttttcaaaaggtaacaaatgttgtataataatagaatttgaatgctgctttttttgggagcattctatgttatcatgcttattggagaaaaatttttcctgtaacgctattcgatcactatcgtcaaataatatagatggttttacaattggaggtttggttacactgtgaattacatcccctgtatgattacgataggaaacttcatttgcggattgctggcgattcattccttgctatatcacaacattcattcagcagtgctttttatttttacaggcatgttccttgatttctttgacgggatggctgctcgtaagctgaatgccgtttctgatatggggagagaactggattcgtttgccgatctggttacgtttggggtggctccttctatgcttgcttacagtgtcgcgttgtataccctgccatttatcgggatcttatgcgcattgacgtacagcatttgcggaatgcttcgcctctctaaatttaacattgaacaaagcaagctcccgacgtttatcggtatgccgattccgtttgcgggcatgtgtctcgttattttaagcttcacctataacccgatccttctggcaatcggcacttgcggactctcatatttgatggtgagtaaaataaaattccctcattttaaaaaacatgcggcagaaaacctggagtctgggagatggaattagttcagcagctcatagcggattacggttatctcgctatttttttgatgctggtattaggaattgtaggattgccgattccagatgaagtgatgatgaccgttgttggctatttcacgcataccgatgtattgaattatgagctttcgatattgattagttttgtcggggctttgttaggtatgctgatcagctacatgattggcagaaaagccggacgcccgtttattgacaagtacggcaagtgggtcggcttaaaagaaaaaagaatgatgaaagtggaaaaatggatgaagaaatacggtccatattctcttattttaggttattttattcccggcgtcagacatgtgacgtgctacttttcggggatcggcaaaatggatctgaaaacgtatgttgcgtttgctgcaatcggcgcctttttatggtgctttgtttttattacaatcggaagggttatagggattattcatgtttaatacggctgtaaagattctgtatcgatcattgatagagctgacgaatcatcgtttgtcatcctatctgattaaaggattttgcgagtcgaaaatcagcaaaccggtcattccgcttttctcaaaacattttcggctgaattgggatgatgtggacggtacggctgctgattacggatcgctgtccgaattgttcattcgacaaataaatctggagcggcgccctgtgtcaaaagaggcgcatgcggtggtcagccctgttgacggtgtggttcagacggtaggaatcatcaacccgaatcaaacctttacggtgaagggaaaagattactcattcgctgagctgaccggctgtaaaagcgcagaccatcaatacaatggcggttacttcgtcgtgctgtatctaagcccgaggcattatcaccgtttccattctccgatcagctgcaggtatcaaaagctggccgagcttggaaatcgctcatacccggtaaatcaactaggcttaaaatacgggaaagatgtgctgtcgaaaaattaccggtttgtgtacgagctgaatagcggcagccgaaatctcctgatgattcctgtcggcgcgatgaatattaattctatcgtgcagacgaatacccgtactgaattggagatcggcgaagagctgggatacttttcatttggctcaacggtcattttgatttttgaaaaagacgcgttccagccgtccgcccatttagcagaaggccaagaagttcaagtcggagaactgataggttatgaagagtaaaaagaggagcttgcataaacgcagcgcctctttttttgaagaaaggtgagacttatggagaaacaaatcatcagctggattacagattatcagaacaccggagatgaagccgtcctgcggcaagtgcgagaagtgtgctggccgatcgttgaagcggttttgcatgagaaggcaatagatgatgaacaagcgaacaatttacgcgacaaaggaatcgagcggtttccattcatcatcagcaaataccaagcggatgtgcagcttccggttgagacatttttacgaaatacgtatcggttttactttcatcaggtgatgagagaatccagctaaagcttctttcaacagagaagcttttttttgttggcaggaaaaggaaactttttctatatctatctcgtaatgactagagaacctagcagaaaaggagagatagaattgaaacgaatgatagtgagaatgatcctgctgctgctgattgtctgtctggcgttttcttctttttcagtctcggcacgtgctgcttctgaagaaaaacattgggagcgctggattgaacgacatgcacagccactggatgcttccaatgcttcaaacaaagaccttcactttctgaagaaggtgctgaaaggaaaacgaatcgttcagttaggagaaacgacacatggcgctggcgaaatcaatgccacaaaggtcagaatgatcaaatacctccacgaagagctgggatacgatgtattggcctttgagtctggcttccctgatacaaatgcatcctaccttaatatggaccaattaacccctaaaagcacgatgaaaaactccatttacgctgtatggcacacagaagatgtcgttgaattgtttgattacatgaaagagcaaaaagagaaaggcgatccgctgatccttaccggttttgatattcaaagcatgaagaattcattcaatgatgctgcgactcattgggtaaaagcggtggaccctgagaaagcagagttgctctcccaatcagaaaatgatttttcaacattagtgacagacagcaatacgtttgatgaattttcgcaaaagaaggaaaagcttgtgaaaaactatcagaagctgatcaagttcactaaaacacatgcttcagagctaaaagaaaaccttccaaaagagccgaaagcttatgagatgtttatgcattctcttcagctgagaattgacgtaatggaaacgtatatgctggaagaaatgaaagaaaaactagaggagtatccggagaatattgaggatttttcattctttatgagagaccgcatgatggctgaacaatttcagtgggtagctgacaccctttatccgaaaaagaaaatcattgtctggggccacaattaccatctacgcaaacagaatacgaagatgataaaggactgggtacagctaaatggccctaacatgggtgattatttgccggagcggctgaaaaaacaaacatatacgattggcatttatgcttactcaggtgcgagtcttgatagctccgataataagactgttaagccggttacaagcccgccgccgtctgggagccttgaagctttgctgaaagcggcggaccgaccggctgtttttgttgattttctccatacaaaaaacaagaaaggcacttcgtggatgtataccccccgcacagcactctattggggattcacagaagagcagctgatccttaaggaacaatatgacggtgtcatttggctggagcatatcacaccatctgtcattatcaagtgagcggtgtcccctgtggtaaacaggggatttttacatatcgcaaaaataatcaaaacatataatccgtgatccattattctaaaacagaaaggagattggagcgtgcaatgtattatgaaaaagctgtccagaaaacaatcaattggattgaatcacatttacatgagcaaatatcaaacgaggatattgttaacgtttcaagcttttcaaaattccattttcatcggatttttcaaaaagaagtcggcatgtcggttgcttcttatattcggttaagacgtcttgcgaatgcggcggcagctttgctttatacagatcatcgtattatcgatattgctttgtattatcagtttgaatctcaagaagcatttacgaggacgttcaaaaagatgtatcacatgccgccaggagcataccgaacatttatgaaacgctttacttcaaaaaaggaggaatcttacatggagaaaaaaatgaaaggctgggtattgagcgggagccatccgttccaattcgaaatggggattgaccgggaaaatgtacatcagggaaaagcttcagggtatttaaagtcaacgatggttcaggatatcggtgaatttgcgacgatgatgcagcaattcaaagcagatcgctatctaggaaaaaggcttcgtctatcaagttttatcaaaacaaagggggtgcagcattttgcctcactttggatgcgggttgacagtgctgctgatgatgttctccaatttgataatatgagcaacagacctattaccggaacaaccaattggaatcattatgctatcgttttagatgtcccagaaaatagcgctgtgatatcttttggcgttcaattatctgggccgggtcaggtgtggatggatcatgttgtttttgaagaggtagatgagagcgttccttcaacaaaccttgaaatgccgggagaacttttagatgaaccggtaaatttatcttttgaagaggaactacaaaaatagttttcagacaactatttttattagtgagttattggaaaatactatttgttattaataaacccttgtgctgcttaggtttgtaagagcttggatatttttatcagtctgggcggatctgttcatctttgcggcattttcctgtatgatatagtaagagtgtgcatagcaactaactataattgaacagggtgtttaaaacatggaaaaacaatacagagtattactttactataaatatgttccgattgaagatccagaggcgtttagagagcagcatttggctttttgtaaggagcttggtttgttaggccgtatccttgtttcttctgaaggaattaacggtacggtatcaggtacggttgaacagactgaaaaatatatggaaacaatgaaagctgatcctcgttttgcggacatggtatttaaaattgatgaagcagaaggccatgccttcaaaaaaatcttcgtccgccataaaaaagagcttgtaacgcttcgtcttgaagatgatgtcgatccgaacgaaacaacaggccagcatttgaagcctgcagaattttatgagaagatgcaggatccaaacacaattgtcatcgacgcgcgtaacgattacgagtatgaccttggccatttcagaggtgcggtccgtcctgacatcgaagccttccgcgaattacctgaatggatcgaagaacacaaagatatgcttgaaggcaaaaagattttaacgtactgtacaggcggcgtacgctgtgaaaagttctcaggatggctggtgaagcaaggctttgaagatgtagcacagcttgaaggcggaatcgtgacatacggaaaagatccagaggtgcaaggcaagctttgggacggccagtgctacgtatttgatgaaagaatcagcgtgcctgtcaaccgtgttgagcatgtgattgtcggtaaggactactttacaggagaaccgtgtgagcgttatgtgaactgcgcaaatccatcttgcaataaaaaaatgatatgcacaccggaaaatgagtataaatatatgcgcagctgcagccacgaatgccgcacgaacccaagaaacctgtatgtgaaagagcataatatgacagaagaagaagtaaacgcaagactggcagcgattgaaacagaagatcacgctgctgctgaataaaaaaagaacacctcgtattgaggtgttctttttttctatatgctttcagtttggctgtttgcggaaacccattctttttggcggaaggccttttcccattttgataccacgatacaggcgatcgcatgtcccggtacgttcacgcccgttctcgccatgtccatgacgcggtcaacacccgcgataatggcaacgccttcagccggcagtcctacagcattggcagtcgccagaagaactacaagcgatcctgagggtacagctgcaatgcctttactggtcatcacaagcacaagcatcatgagcagctgctgggacaatgtcatgtctacttgaaaggcctgtgcgagaaagatacaagaaactgataaatataagctggagccgtcacagttcaatgacaagccggagggaacgacaaatgataccactcgtttgggacagccgtatttctccattctatccatcagctgagggagaatggtttcagtgctggtggtggaaaatgcaattaaaaacagatcccatatcattttcaatacttcgaaatacttaatctgaaagatgagaccgacaagcggaaagaggacaaagaggatcaggaacaggccaaggaatacggtgccaaccagcttaaacatagggaggaggagttcaatgccgtattggcctacagaagctgccatcagggctaacacgccgataggagcagtgaccatgacgatttgtgtgagcttgaacataatctgagcggtagattcaaagaacttcatcactggttcagaagctttgccgataccagcggcggcgacaccaaataaaatggcgaagaaaataacggcaagcaaatcatttctggccatgacatcaataatgtttgtagggataatatccaggatcatttgcttgaaatcaacaactttgtctgtgtagccggaaagttcatggatatctttttttgccaaatgggagaggtcaagcccgacacctggttttaagacattcgctaataaaagtccaagccctaataccaacgttgtaatcacttcgaaccaaatgatcgtcttgatgccgagactgcccatttttttcatgcttccgcttcctgctgctccaatgacaatggtagaaaatacaatcggcacaacaatcattttaatcaggcggataaatccatctccgacaggcctcagtgccatcccgaaatcaggaaaaaagtggccgatcaccgcaccgacagccaaagcgattaaaatttgaaacgcgattaattttttcaaatgaatccccctttagaacgatagaatgtaggcatattcatatcattcgtgattcaaatgcaaacaccttttttcaagttattttattttgacagcgctttcattatgttggcgaaaaagtcccccgcagcagggggacttttttacttcatttgaatgtgctttagatcttcttcagaggtatttgtgaaaataaccggtgttatggctgaagcggcatgctgcttgatgtaattgagatcaaaggtgagaagcagttcgccttgtttgacggcttgtccgcttgtgacatgtgcttcaaagccttccccattcagtttgacggtatcgatgccgacatgaatcaggatttcagtgccgccggcgctcataaagccgatggcgtgttttgtcggaaaaatcgagacgatctcgccgtccgcaggtgcaacgacttttccttctgatggtataatcgcaaatccctcgcccatcattttttctgaaaagacttgatcaggcacatcccctaaagagactgtttctcctttaatcggataaaaaaaggtctcaccggaatcgggcttctgcggtttgtcagttaccgtgtccagcgtggcggcggtggcagggacgcctccggccatgattgttttgatgtcgtcttttaaggcatcggacttggttccgaatattgcctggaagttgttgttgacctccagcacgcctactgcaccaagccgttttaattcatcctttctgacttgacttggctgatgaacggtcacacgaagccttgtgatacacgcatccaggttagcgatattttgctgtccgcccaaggcctgcaacacgtgaaaggcaagttggtcttttgcaactggagctttctcctcattctgaccgtcttcatctgtctcacggccgggcgttttcaaattccatttcagaatcgcaaatcggaacaaataataataaatgaaagcaaacacgatcccgacaggaatgacaacccagccgtttgtagacagtccgtagttcaagacgtagtcaattccgccgcctgagaacgtatagccgtggcggacatggaataaatcacaaacgacaaagatgacgccggcaagaatagagttaatcaaatagagcacgggcgcaacgaacaagaaagaaaactcaaccggctctgtaattccggtcagcatagatgtgagcgccgcagaaatcatcacgccggagatcatttttttcttttccggacgcgcggtatggataatggcaagagcaactgccggcagacagaaaatcatgtaagggaaatcccccatcataaagcgcccggctgtcgggtctcccgcgaaaaaccttgtcaggtctccggttacggtgttgcctgttgatgggtctgtgtattctcccatcataaaatagaaaggcgtataaaaaatatgatgcaggccaaaaggaatcagcaaacgatagatcgttgcataaaagaacaggccgactgttgaatcggcaattaaactgctggctgcgttaattccgttttggattagcggccaaacgaatgagaaaatgacgccgatcaccaatgaactgacggaagtaataatcgggacaaagcgttttccagagaaaaatccaaggaccggatgcagctcgattgatgaaaatcgcttatataaataggcggcgagaagcccgataatgattcctccgaaaacccccatatcaatcaggtgctcggctccttcatacggaggctgaaggccgagtaattttcccatattgtcgagggtgacggttaaaattaagtatccgatgacagctgcaagtccggctacaccttctccgccggctaatccgatcgcgacccccacggcgaaaatcagcgggagattatcgaatacaacgccgcccgcatcctttataatagggatgttcagtaaatccttgtctccgaaacggagcaaaagacctgctgccggcaggacggcaaccggagtcatcaacgcgcggccaagctgctgcagaatttgaaatgcctttttaaacatgacagtctccttttattgtgttatgagaatgatgcactctttaatttttgagctgctttataatcggcgataacggttacatgattgtgtttttgaagaatagaggctggtacatctgtcgtgacaggacattcagccatcttttgaatagcgtctgctttttcctcgccgcttgctaaaagcacaatatgtttgctgaattccatgatggttttaatgcccattgaaatcgcgagtctcggaaccagcaccggatcgccgccgaagaatctggcatttgcctgtatcgtgctttccgagagcttcacaacacgtgtccggtcttcaaaatcagatcccggttcattaaaaccgatatggccattggcgccgatgccgagaatttggacatcaatgcctcccgcctggcggatgagatcctcgtatactttgcattccgcctcaagctgcgggttgtctccttgcgggatatgaatatgatcaggctgcatattgatatgctgaaatagatgctcatgcataaagtggttataactttgcggatgagatggagagagaccagcgtattcatccaaattaaatgtagtaacctttgaaaaatcaatttcgcctgcctgatagtctgaaatcaactgcttatacaagccgaccggtgtgcttcctgttgccaggccgagaacggtatctttcttagcttgtatttgttctttaataatggcagcgcttaacttacagagttcttcgtagtgctcggcgattagaatcttcatgtgacaccccctcaaagagatagacaagcaccatatttgttatgaccaatttatgatacttgtcattacgaatttagcaccgcccttatcaaactgtcaatattaatttctgaaaatttgttataaaagaaggatacaaatctttcatattgggatggcaaatggtattatggtctcaatgaaaaagaacggattgcatacagaatggggagaatgaaatgacagctttatattctgtgatcaagtttaaaatcattgagttgattaaatcgggcaaatatcaggcgaatgatcagctgccgacggagagtgagttttgcgaacaatatgatgtcagcagaacaactgtgagactggcccttcagcagctggagcttgagggatatattaaaagaattcaaggaaaagggacatttgtatcggcggcaaaaatacaaacgccgattccgcataagattacgagctttgcagaacaaatgagaggccttcgttctgaatcaaaagtgcttgagcttgtggtgattcctgccgatcactccattgccgagcttttgaaaatgaaagagaatgaacctgtcaacaagcttgtcagagtcagatacgccgagggggaacctttgcagtatcatacctcatatattccctggaaggcggcaccggggctggcgcaggaggaatgcaccggctcgctgtttgagttgttaaggacaaaatacaatattgaaatcagcaggggcacggaatcgatcgaaccgattttaaccgatgaaacgatcagcggccacttattaaccaatgtcggagcgcctgcgtttttatcagaatcccttacctatgataaaaatgaagaagtggtggaatatgcgcaaattattacccggggagaccgaacgaaattcaccgtagaacagtcatatcattcataaagcaatgtgttttaagaagggaatggtggttctatgtttttatttacgaatggaaaagtgctgtggggagcagtgattgctgcattcatcctttcaattgtattttacccttttctgccgacgcagatgccgattcattatgatgttgcgaacagtccggatctgacggttaacaagctggcggggactgtgatgctgcctgttttgatggtggtgtttgcatgggcgcggaagatcaattggcaatttgtattcgcagtgtatattttgctgatttgccacattgtcgtcctttgtttagcgctctaaatcaaacagccagaataaaactggctgttttctttaatttcagcttcatctgacaatgaatgtggtgtataatagctgatgatcctaaagaatattctgaaatttatcggtgtggagcggcgtatcatgaaaggaagggctgtatgttttttgcagctttaaaaagactgaatatttaaacaattatatgaaaggtgtgctgatcagattgaataagcttattgaacgagaaaaaactgtatattataaggaaaagcccgacccgtcttccttggggtttggacaatattttacagattatatgtttgtgatggactacgaagagggaattggatggcatcatccaagaattgcaccgtacgcaccgcttacgctcgatccgtcttcatctgtttttcattacggccaggctgtttttgaaggattaaaagcatacagaacagaggatggcagggtgctcctgttccgtccggatcaaaatatcaaacggctgaacagatcgtgtgagcgcatgagcatgccccctttagacgaagagctggtgcttgaggcattgacacaattagttgagctggagaaagattgggttccaaagaaaaaaggaacgtcactgtatattcgtccttttgtcattgccacagaaccgagtctcggtgtgaaggcatccaggagctatacatttatgatcgtgctttcgcctgtcggctcctattatggcgacgatcagctgaagccggttagaatctatgtcgaagatgagtatgtgcgggcggtcaacggtggagtcgggtttgcaaaaacggctggaaactatgcagccagtcttcaggcacagcggaaagcgaatgagctgggctatgaccaggtgttgtggctggacgccattgaaaagaaatatgtggaagaagtagggagcatgaacatctttttcgtcataaacggggaagctgtcacacctgctttaagcggaagcattttaagcggggtgacacgtgcgtctgcgattgaactgattcgaagctggggcattccggttcgtgaagagagaatatcgattgatgaggtgtatgcggcctctgcacgcggagaattgacagaggtcttcggcacaggcacggcagcagtcgttacgcctgtcggtgaactcaacattcatggaaaaacggtgattgtaggcgacgggcaaatcggggacctctcgaaaaagctgtatgaaacgataacagatattcagcttggcaaggtgaagggcccgtttaactggacagtggaagtgtgaaaatcgaaaaagaacctgcctgaaggcaggttctttttattttgaataagtcatatcagcagccggctcgcttttgcggttttttacataatatattgcatagcaaatggccataaatggaacgccgcaatagagtgcgattctttgattcggatcaaaggcaatgccaacaacggaagccaggcataacaggaacgcagcaatcggcacgaacggatacaaaggggttctgtatttcaaatcagtaaccttgtttcccgcttcgatataacgttttctgaacatgaattgagaagcagcgattcccatccacacgacaacgacggcaaaaccggaaatcgacacgagcacaacgtatacagtgtctggcgcaaatacgctggacagcaacgacagaatgccgccgatcatgctgaacaccagcgcgttaaaaggggttccttttgacgtcagctttgcaaatgtcggatgaagcgttttttcttttgataaagaccacagcatccgggaagaagcgtagagtccggaattagccgctgacaggatcgctgtcaggataacaaagttcatgatatcggctgcgtatggtacaccaactctgtcaaaaacagcgacaaacgggcttttgatgacacctgcatcttgaatcggaatcagccctgacagcacaaaaattgttccgacaaagaagagtgagagacgccagaccgttgttttaatcgcttttggtatcgtcttgtcagggtcaacgctttcaccggctgcgattccgattagttccgttcccgaaaaggcaaaattgacggacagcatcgtcatcaaaatcgggacaaatccatttggaaaaagcccgccttccgcggtgaagttggacagcatcggagcggcttctccgcctttgatcggaatgatgccgaacatggcagagccgcctaaaagaataaataatacaatggctaatactttgatgctggaaaaccaaaattctgattcagcgaaaaacttgaccgaaaatgcgttaagcaagaaaatgaacagcgcaaagacggcactccacatccaaaccgatgtatgggggaaccagcgctgcattaacaggccggctgctgtgaattctgatcccaatgccacggtccatgttagccagtacagccaagcaaccgtaaatccggtgcccggccctatgtatttggctgcataggtgtgaaaggcgccggtcacaggcatggcgactgacagctcaccgaggcatagcatgaccagatagacgatgccggccccgactaagtaggcgagtatcgttccggccgggcctgcttgctgaatggtataacctgagcttaaaaacagcccggttccgatgacacctcccaaggaaagcataaagaggtgccggcttttcatacttctctgaaagtttgtctcattcttgttgtgggcagagttcatctttttccaactttctataagcgatttatttcctcctaataaaaaatctcatgtcaggaagtgacacgagactccggcgaaccggctttaagttagaatatacaaactattccgataagtcaagttgtttttaaagagcgggcccaagccgcaatttcttgaatatcttcgggttttgtccggcagcagccgccaatcagtctcgcccctttttcatgccaggtgcgggcgctcgccccgtaagattctgcgtatgctgcgccgttccacgtttttgtttccggatcatattgctcacctgaattcgggtagacaatgatcggttttgacgtgttcttttttaactcctctatcaaggaagggatatgctgaagcggcgtgcagttgatgccgagtgctgcaatttggcggtgttcatcaagccacgatgcgcagtcagctgcaggtgctccgtcactgatatgcaagccgtctttagcactgaagctgatccacgcatacgtttcaggaaattccttcaacagctgaacaatcgctttggcttcagtcagacacggaatcgtttcgcatgccaaaacatcagctccggcttcaatcagcgccttcatccggggacgatgaaattcaatcagttcatcttctggtattgcgtagttgccgcgatattcagacccgtctgcaagataagcgccataagggcctacagaagccgcaatgatcggctttggccgattcaaacggttctcttcaagcgaccaaaattcatcgcgtgcttcagctgcgatgctgacggacaactcgatgagccggcgtgcttccgcttcgctcagcccgcgtgcggcaaagccttcaaatgtagactgatagctggcggtgattgcacaatcggcgcctgctgcgaaataatcagtatgaacttgtttaatcagctccggctcttccatcaggatttttgccgaccacagactgtcgttcaaatcacagcccttgcgttcaagctcggtcgccatggcgccgtctagcacaataagcgggtatgtatctagtatgtgttggataggattcatagaatgtacctttctttcagatttttttgaaaaagatatgaaaatcgtaatggaggcttacgtgtttgtcaataaacgcaaaaagagaaaggtgttcagcccatatgtctgaacacccttttcttatgatatttgtttgttgtgcgtgtcagtctttgtgtctgaaaccggccagcactcaatgccattatggtttttgagcacatctttataaaagacaggatctttgcctgcttttttctggcgtgtatagtctttcagcgccgtaaaaacaacctttgatagtaagaaaatagcgattaaattcacgacgaccatcaaacccatgaacaaatcagcaagatcccagacgagctggactttggcaacacagccaaacacgatcattgccagcacgccgatacggtagacaaaaatcagttttttgcttttgttcaaaaagccgatattggtttcgccataataatagtttccaattagagcacagaatccgaataacaaaatcagaatggccagaaagcctgatgcccatgatccgacatgggagctgagggaggcttgtgtcaaggcgattccgctcagacccggagtatgataggcatccgaaaacaggatgataaaggcggtgcttgtacaaatgaccagtgtatctgtcagtacaccaaaagcttggatcagcccctgtttgacgggatggcttgttgtggcggtggcagcggcattcggtgcgcttcccattcccgcttcgtttgaaaagattccccgtctgacgccttgcatgagtgccgcgcccaaagccccgccggcggcctgatcaaaaccaaacgcatttttcacgattagcgcaagcacacttggcagctgcgtaatgttggtgaaaatgacgaaaaacgcaactccgatatacaggacagccaatacgacgacaatggattcagccagctttgcaatgcgcttgactccgccaaaaataatcgtgccgaatacagcaattaaaatgagtcccaatgtcaggcggtttgtgccaaacgcgttttcaaaggcaaggctgactgtattggattgaaccgagttgaagacgataccgaacgataaggtgattaacacagcgaacagcgcgcccatccaccttttgttcagccctttttccatgtaatacgccggcccgccgcggaagccgtttacatcttttactttataaatctgagccagtgtgctttccacaaagctggatgctgatccgataatggcgataatccacatccagaagattgcaccgggcccgccgagtgcaatggcgatggcaatgcccgtaatatttcccgttccgacacgggccgccatgctgatgcaaaaggcttgaaacggagaaatgctgttttttgaccgggaagcagcaccttctcttaataccctgaccatttctttcagcatgcgaacctgtaaaaacttaagcctgaacgtaaaatagattcccagagaaaggagcaaaacaattaatagctttgaccacaaaagatcatttgcaataccgacgatatgttccaggatttgctgcatacaatcacctcttttttcatatttaaaaaatgctgagctcccattcctgcgccatatgcttcagcagcataccgccagtgaggctgttgccgtattcatcaatggcaggcccgtaaatgccgatgccgcatccggattgaaaaggctgttctcttctggcgcttggaggcaccagcgccatgatgccgccggagacgccgcttttggccggcacgccgacaaacgccgcatatttgcctgaagcgttgtacatgccgcacgtcagcattaatgccttggctaattttgccacatcttttggaatcacctgctcgcgtcgaatcggatgatacccgtcatgagcaaggatcaggccgatcaacgcaatatcttctgtggtgctctccatagcgcattgcttcaagtacacctcaagtgtttcttctacgtcagcttctaaaaagtttgtttcttttaaatagtaggccagcgctctgttgcggtgggcggtttcccattcagaacggaatacttcctcatgaattctcggccgttttcctatcaaagtttccatcaccgagtaaagaaactcgagcttttcgtatgccgattctccgggaaggatcgaagcgatggtgagggcacccgcgttgatcatgggattgaagggctttcccggcttgttgatttcgagccgaatgattgaattaaaggcgtcgcctgtcggctcgacatctacgcggtccagcacatagggaatgccgcggctcatgcaggcggcaataaagctaatcacttttgaaatgctttgcagggtaaaagagacgttccagtcgccggcgtgtatcatcgttccatcaggctccaatacacagatgccgagctgtgaatcattgacttttcctaaagcggggatatagtttgcgctttgtccattggcggcaaaagggcgatagtattcaacccaatcatgaagctgtaacgccggatttatgtctttctggtgctcttttatcaattctttcatcgaattcctcctcactgatttttttcttaaaggactgaggtgtatcaaaacgaaggctaaaggggcgttaaacgctttcataatagcggaaggtataattactgtataatggagactacagaatcatacaaaatacgacaaaaacattttgaaaataagcagtaagatttataaaaacctcatgttctgggtcaaaagcaatttgcaggttttctcccgattccccaaaataaaaagcgaggatgtgatcaacataaaactggaacggtttattgaaaaagacggatatatactggccctcatgctaattacggtgccgctggccggtgaactgaaattttatcccctcaatgaagaattccgggtcagctttggggcaccggtttttttcttctttttatcgttgttgcggcatgtgcccgctgtgctgccgggttttctgactggagcggctgttttcatctttcgcgtctttctggaattatggggcggaggacacaatgggctgactccgattctgtatgatcaagcgtctggctttttcttttatatgacttacgcctgtctgttttccatattaaaggccaatcgtttccgtgaacggccgattatgctcggtttcattgggtttatgattgaagttgtgtcagattgtgtcgagctggctgtgcaatttctcatttttcatacggttgttacgcctgagaaaatcactgacattgcggtgattgcgatttctcacacatttattgtgatgagcttttatagtgtgctgaagctgtatgaaacacaatcgagagaaaaacagacaaggcagcagcacgagcacatgctgatgatcgtttccaatttatatgaagaaacggtgcacctaaaaaagacattgaaaacgacagagaaagtgacaaacgattcgtatcagctctatcgggaaatgaagggcaaggatgttcagctgagcggcagaatcctgagactggccggagagattcatgaagtgaaaaaggacaaccagcggatattcgcagggctttcaaaactgatttcgaatgagagtttgagagattatatgagggcttctgatttgctgcagctcgtgattcgaatgaatgaaaagtacgctgaagcactagggaagcagattgatttttactgctcgatcgagggagagcatgacgaatatcacgtatttatcgtgctttcgatcattaataatctaacagcaaatgcggtagaggctatggatgaagagggaatggtcagcctgaggctccgtaagccaaatgagagtatggtagaattccaggtggaagacaatggccccgggatttccgagaaaatcggagacattgtgtttgacccgggctttacttcaaaatatgacgaatttggcacgccttctacgggtatcggactttcctacgtaaaggaaatcgtgactgagctagaaggggatatcacgtttgataatcagcagcggggagtggtgtttgccatcaggctgcctgtccggcatttgattcagaaagggtgaaccgaaagctatgcgtttttttattgcagatgatgaccgtgcagtgcggtcaattttaaggcagatcattgaggacgaagatctcggggaagctgttggtgaagctgacgacggaagccaagtggaagggcatatgctgcaatttaagcagattgatattttattaatcgatctgttaatgcccggaagagacggcattgagacgattcgtcagatccagaatacgtactccggcaaaatcataatgatctctcaagtggaggcgaaggaaatggtcggggaagcgtactcgctcggcatcgaatattttatccataagccgattaaccgcattgaaattgtcacggttctccaaaaggtgaaggagcggattgagcttgaacactcgattggagccattcagcattctctaagccggcttgtcaatcggactgaacggaaagcgcgtccccagcagaagagtgacagcggtttaaaagaggcaggaacattcctgttgtccgagctgggcatgatgggagaaggcggcgcacatgatctcatggcggtcctgcagtatttagcagaacacgagcaatccgagccgcacgaaaaacaaagcccttcgctaaaacaaatattcacccaagtagcgctacggaagctgggcacaggggcctcacagacggaagtcaatcgcgaaatgaaagcctcggagcagcgtatccgcagagcgattattcattcgctgcaccattttgcttcactgggcacaactgatttttcgaatccaaaatttgaaacctatgcatccaaattctttgattttccggttgtcagccagaaaatgaaagaactccaatccaaggatgcaaaaccccttgcacctgctagaataaatatgaaaaaattcatccacgtgttttttttggaagcaaagcttttgcatgagacgatgaaacaaagaaggatataaaccaaacagccggctgaccaggctgtttttttgctgcgcagaatcccggccggacagtgattcaccgcttttttataaaatatcagaaaataaagatattgacttattgtttatttgtcttacaattaaacaaaaggatatatggggaaggagcggatgtgaaagaaaaattaataaaagcgcttacagatagaggctgtatacacaaataacaggaggttatgttgatgagccgtatcagaaaagcacccgctggaattttaggttttccggttgctccttttaacacacaaggaaaactggaggaagaagctctttttcaaaacattgagtttttgctgaatgagggcttggaagcgatatttatcgcttgcgggtctggtgaattccaatctctcagccagaaggaatatgagcaaatggtggaagtcgcagtctcggcagccggaggaaaggtgccggtctacacgggggtgggcggcaacctcagcacagcgcttgattgggcgcagctgtcggagaaaaaaggcgccgacggctacttgattctgcctccgtatttggtgcatggcgaacaggaggggctgtaccagtatgcgaaaacgattattgaaagcactgacttgaacgcaattctttatcagcgcgataacgccgttctctctgttgaacagatcaaacgtctgaccgaatgtgaacagcttgtcggtgtcaaagacggggtaggaaatatggatttgaatatcaacctcgtctatacgatcggcgaccgcttaggatggctcaacggaatgccgatggctgaagtgacgatgccggcttatctgccgatcgggttccactcttactcttcagcgatttcaaattatatcccgcatatttcgcgaatgttctatgatgcattgaaaaacggaaatgacgagcttgtgaaggaactctatcggcatgtgattctgccgatcaacgacattcgcaaacaacgaaaaggctacgccgtatccttgattaaagccggtatggaaatcatgggtttgaatgtaaggaatacagccagaccgcctgtcggcccggttgaaaaagatcattatcagcaattggaagcaattttgaagcaggcggctgaccgttttccgaaaaaagccgcgacggtttgaccagaaaaaacacgaaaggggcaatgggcatgtctgtgatcacggaacaaaacacgtatctcaactttattaacggagagtgggttaagtctcaatcaggcgatatggtcaaggtcgaaaaccctgccgatgtgaatgacattgtcggatatgtacagaattcaacggctgaagatgtggaacgtgccgtcgccgccgccaatgaagccaaaacggcttggagaaagctgacgggtgccgaacgcggccaatacttatacaaaacagcggatatcatggagcagcgcttggaggaaatcgccgcctgtgcaacgcgtgaaatgggtaaaacattgccggaagcgaagggagaaacagcccgtgggattgccattctgcgctattacgccggagagggcatgcgaaaaacgggtgacgtcattccgtctactgacaaagccgcgctcatgtttaccacccgtgttccgctcggtgtggtcggcgtgatttctccgtggaacttcccagtggcgattccgatttggaaaatggcgccggcattggtatacggcaataccgttgtcatcaaaccggcgacagaaacagctgtgacatgcgcgaagatcattgcctgctttgaggaagcggggctcccggcaggggtcatcaatttggtgacaggcccgggttctgttgtcggtcaggggcttgctgagcatgacggtgtaaacgccgttacgtttaccggttcaaatcaagtcggaaaaatcatcgggcaagccgctttagcgaggggagccaagtaccagcttgagatgggcggcaaaaaccctgtcatcgtagctgatgacgctgaccttgaagctgcggccgaagctgtcataacgggggccttccgttcaaccggccagaaatgcaccgcgacaagccgtgtcattgtacaaagcggaatttatgagcgctttaaagaaaaactgctccagcgcacaaaagatattacaatcggagacagcttaaaagaggatgtctggatgggaccgattgccagcaagaatcagcttgataactgcctgtcatacattgagaaaggcaaacaggagggggcttcccttttaataggaggagaaaagctggagaacggaaagtatcaaaacggctattatgttcagcctgccatctttgacaatgtgacatctgagatgacaattgcccaggaggaaattttcggtccggtgatcgccttgatcaaggtggactcgatggaagaggcgctgaacatcgccaatgatgtgaagttcggattaagtgcatccatcttcacggaaaacatcggccgaatgctttctttcattgatgaaatcgatgccgggctggttcggatcaatgcagaaagcgcaggtgttgagctgcaggcgccttttggcggcatgaagcagtcgagctcccactcccgagaacagggtgaggcagcgaaggactttttcacagcgatcaaaaccgtttttgtgaagccgtaatggtgctggaaagaggcatgcgtctctttcccagctttatcacagccagcatatgattctctactttgaaaaggagaagatactatgaaaaaagactttgcgaatgttacaccggcgggcaaaaaaacgtccgtgcgctggttcatcgtgtttatgctgtttcttgtgacctctattaactacgcggatcgagcgacgctttccatcaccggagattccgtccagcatgatttgggattggactcggtcgccatgggatatgtcttttctgcctttggctgggcctatgtcatcggacagcttccgggcggctggctgctggaccgttttggttcaaagactatcattgcgttaagcatctttttctggtcgttttttacgctgctgcaaggggcgattggctttttctccgccggcacagcgattatcctgctgtttgcactgcgttttctggttggtttatcagaagcgccttcatttcccggaaacggcagagttgttgcctcatggtttccaagctccgagcgcgggacagcttcagccttttttaattcagcacaatacttcgcaatcgtcattttttctcctttaatgggctggcttacccactctttcggctggcattccgttttcgttgtcatgggtattgcaggcattcttctggctgtcatctggctaaaaacggtgtatgaaccgaaaaaacatccgaaggttaatgaagctgagcttgcgtacatcgaacagggcggcgggctgatttccatggatgacagtaaaagcaaacaagaaacagaatcgaaatggccgtatatcaaacagctgttaacgaaccgcatgctgattggcgtgtacatcgcgcaatactgtattacgactctcacctatttctttctcacatggtttccggtatatttggttcaggcccgcggcatgtctattcttgaagctgggtttgtcgcttccctgccggcgctgtgcggatttgccggcggcgtccttgggggcattgtgtcagacatcttactcaaaaaaggccgttcactgacctttgcaagaaaagtgccaatcattgccggcatgctgctgtcttgcagtatgattgtctgtaactacacagattcagcatggctcgtcgttgtcattatgtcgctcgcgtttttcggaaaaggcttcggcgcattgggttgggctgtcgtgtcggacacgtctccgaaagaatgtgcaggattaagcggcggtttgttcaacactttcggcaatattgcctcgattacaacaccgattattatcggatacattgttaatgccactggatcttttaatggcgcgcttgtgtttgtcggcgctaacgcgattgcggcgatcctcagctatttgctgctggtcgggccgatcaaacgggtcgtgttaaagaaacaagaacaagaccccgatcaatcgttgcctgtctaatatttatgaaagcgctttataaagggaggaaaatgcatgagttcaccgatacaagagcaggttcaaaaagagaaaagatcgaatattccctcaattactgaaatgaaggtgattcctgttgcgggacatgacagcatgctgctgaatctaagcggagcacacagcccgttttttacccggaatatcgtaatcttaacggacagcagcggaaatcagggagtcggcgaggtgcctggcggagagcatattcggcgcacactggagctgtcagagccgcttgttgtcggaaaatctatcggtgcgtaccaagcgatattgcaaacggtcagaaagcagtttggcgatcaggacaggggagggcgaggaaaccagacgtttgatttgcgcaccactgtgcacgccgtcaccgcactggaagcggctttgttagatttgcttggaaagtttcttcaggaaccggtcgcggctttactgggcgaagggaagcagcgtgatgaagtaaaaatgctcggttacctcttttacatcggcgaccgaaagcggacgaccttgccgtatcaaagcgatgagcagtcagattgtgcgtggttccgtctgcgccatgaggaagcgctgacgccggaggccattgtgcgtcttgccgaatccgcacaagagcgctatggctttcaggatttcaagttgaaaggcggggtgctgcggggagaagaggaaatcgaagctgttaccgcattatcgaaacgttttccagaggcaaggatcactcttgatccgaacggggcatggtcattagaggaagctattgcattatgcaaaggaaagcaagatgtgctcgcgtatgcggaagatccgtgcggggatgagaatggctactccgctcgtgaagtaatggctgaattccgccgcgcgacagggcttccgactgcgacaaatatgattgcgactgactggcgggaaatgggtcacgcgattcagctccatgcggtcgatataccgctggctgatccgcatttttggacgatgcaagggtcggtgcgggttgcgcaaatgtgcaatgattggggtttgacatggggctcgcactccaacaaccactttgatatttcccttgcgatgtttacccatgtggcagcagcggctccggggcggatcacggcgattgatacccattggatctggcaggacgggcagcaattaacgaaacagccttttgagatttcttctggctgtgtcaaggtgccggataagcctggactaggcgtcgatattgatatggaacaagtggaaaaagcgcatgagatctaccggaaaatgaatttaggcgcacggaatgacgcgatcccaatgcagttcctgatccgcaactgggaatttgaccggaagcgcccgtgtcttgtgcgataagtttgtttgtaaatattgtcatatccgctattttgtcttacaattgaacaactgaagggagagttgttcgtgtacgaaggtttagaggatttgaaagtcgatacagtcaatcggaaaacattagccaagcaggtcatcgaacggattgtccatttattatcgagcggacagttgagggctggagacaaattgccgacagaaatggaactgatggacattttgcatgtcagcaggccggtgctacgggaagcactcagttcacttgaaacgctgggcgtcattacgagaaaaacacgagggggcacatatttcaacgataaaatcggcatgcagccattttccgtcatgcttgctttggccactgataatcttccggctatcattgaagcgcggatggcgctagaactcggactcgtgacaattgccgcggaaaaaatcaatgaggaagagcttcagcgtttgcagaagacgatcgacgatattgccaacagcactgacaatcattatggtgaagcggataaagagttccatcgaattattgcgttaagcgccaataaccccgtcgttgaagggatgattcagtccctgctgattacccatgcgaaaattgacagccaaattccgtacagggagagagatgtaacggtcgaatatcacaaaaaaatctacgacgcccttgccaaaagagatccgtacaaagcacattaccacatgtatgaacatctgaaatttgtccgtgacaaaattctaaaaggaatggatgaaaaataatggtgagcaaccgcagttgaaacgtaagagctgcggtttttttaaaaccaatttagaaaacgcttactaagttatgaggagtgattttcatatggcgatgaacctcaggaagaaccaagcgcccctttacatcaaagtgcatgaaatagataacaccgcgattattgtaaatgatggaggactgccaaagggcactgttttctcatgcggactcgtacttgaagaggatgttcctcaaggccataaggtggccctcaccgatctcaatcaaggggacgagatcgtgcgttacggagaggtgatcggatttgctgatgagacgatcaaacgcgggagctggatacgggaagacctcgtgagaatgcccgctcctccggcgttagacgatcttcctctcgcaaacagggtgccgcagccgcggccccttcttgaaggctacacgtttgaaggataccgaaatgcggatggcagtgcggggacaaaaaatatcctcggtatcacgacaagtgttcaatgtgttgttggcgttttggattatgcagtcaaacgaataaaagaagagctgctgccgaaatacccaaatgtcgatgacgttgtgccgctgcatcatcaatacggatgcggcgtggcgatcaatgcgcccgacgctgtcattccgatccgcacgattcaaaatcttgcgaagcatccgaacttcggcggagaagtaatggtcatcggattgggatgtgaaaagctcctcccggaaagaattgcctccgaaaatgatgatgacattctatcgcttcaggatcaccgaggttttgcggcgatgatccaatccattttggaaatggcggaggaacggttaatcaggctgaacagcagaacccgggtgtcatgccctgtttcggatctggttatcggcctgcaatgcggcggcagtgatgcgttttccggcgtgacggcgaaccctgccgtggggtatgcggctgatttattggttcgcgcaggtgcaacggttttgttttctgaagtgacagaggtgcgggatgccattcatttattaacgccgcgggctgtcagtgaagaggtcggacaatcactgatcaaagagatgaagtggtatgacagctatcttcggcggggagacgcagaccgaagcgcaaacccgtcaccaggcaataaaaaaggcggattatccaatgtggtggaaaaagcgttaggctcggtagcgaaatcaggcacaagccccatctccggcgtgctcggccctggtgaaagagcagagcaaaaaggcctgctgttcgcggcgacaccggcaagcgattttgtgtgcggcaccctgcagctggctgcgggcatgaatctgcaggtgtttacgacaggaaggggaacaccatacggcctggctgctgcgccggtgctgaaagtatcgacgcggcattccttatcagaacattgggctgatttaatcgatatcaatgccggccaaatcgcgacaggagaggccagtatcgaagacgtaggctgggaaatcttcagaacgattttggatgtggcaagcggccgaaaacaaacgtgggcagaccgttggggccttcataatgatttgtgcttgtttaatcctgctccagtgacttgattcatttttttatagcgattagatggaatatgatgtaaaatacaattaacgtataggaaacggaggggttacagcatggcattcattagattccgagtgacacgaattcaatagtgagcaactctcgcctgaatgcgggagaatcgggatgaatccgcctatgtatgagcccttatatggttattaaaaaagagggtggcgatgcctgccttcttttttctgcctccaaacatcccctctctctccttcagggcggagcatgagaaaggggaaatgggatgacaaaccttaccgaaaaacagatgatcacggagattgtcgggcttgcacgcagccaaggtttgacggttcattctgaggacgcgcaattgaatgaaaccggaatggactttcaagttgtatttgccaaggacgacacaggtatgccatgggtgctgcgaaaaccgcggcgaagtgatgttgtggaaagagcatctgcagaaggcataacgcttgcctttctccgcgcgaatctgactgctgatgtgccggattggagaattcacacgccggaattgatcgcttacccaatgttaaaaggaacgccggcggccgggattgatttggaacaaaagcaatatgtttggaatatgaatcatcagccgccatcagacgattttgtccgtacacttgctggcatactggctgaattacatggcacggatcaaatatctgctgggcaatccggaatagaagtgataaggccagaagatttcaggcaaatgacagcagactctatggttgatgtgaagaataagcttggcgtatctacgacgctttgggaaagatggcaaaagtggatagatgatgatgcatactggccgggtttctcttctttgatacacggcgatctccacccgccgcatatccttatcgatcaaaatggacgtgtcacaggacttctggattggacagaagcgaaggttgctgacccagccaaggattttgttctttatcaaaccattttcggagaaaaagaaactgcccgtttgcttgaatactatgatcaagcaggcggccgaatatgggcaaaaatgcaggaacacatttcagagatgcaggcggcgtatccggtggaaatcgccaagctagctctgcaaacacagcaggaggaacacatcaatatggcgctggaagcacttggtgtaacatcggattaagaattgacttcgtttcatgaaccgagtattataaactctacaaataatagaacggattaacaatcgtgaggaagagcaagtacgcatcagaatggaggttcagagagtcggtggcaggtgtgaaccgatcctcccctgatgccgaatgggcttctgaattgctttgctgaacggatagtaggcgatgccgggtttctctccccgttaccaagagaggagtatcgaaacataggttttctgtacttagagtgaacggctgtatagctgttaataaaggtggtaccgcgagaccctcgtcctttgcataggacgggggttttttgtgtttcttaaaggaggtgacggccaatggacgatggctggtggtggcatagcagatgagttagaaaggaggatatcaaatggtcattgcaactgatgatcttgaggtcgcatgtcctaaatgtgaaagagcgggagaaatcgaaggaacaccttgcccggcctgcagcggaaaaggtgttattctgactgctcaaggatatacgcttctggattttatccaaaagcatttgaataagtaaaggagaaaagctgagctgagatgagagcagaagagcagagtaagattcgtgaggccgcagcaggtacgatttttttgctgatcggaacagtttgttttgcgtctaaatcgatttggataaaatgggcataccaaatgggtgctgagccagatgccgtgctgctatataggcagctgctggctgttccgctgttttggctgatttttttaatatatcgtcctccaatgccagacggtaagaaaaaaggagacctatggaaggcttgtggcgcgggagtgttttgtttttttctgtctcccttgcttgattttatcgggctgaaccatgtatccgcaatggttgaacgtatattgctgatgagctatccgttgtttgtgtttggattcaccgcgtgtcgtgaccggaaaatgtcctcaattcaggaccttttcgcagttctggcggtcatgtttgggcttttcttggcgctgggcggctggaatgctgagcttttccaggcgaatatgattggagctgtattcattttgttatcttcggccgtctatgctggttatcttgtcctttccgggcatctcgtccatcaaatcggggggatccgtctcaatgcatacgggatgacagctgctggagctgccatgatgctttacacagggatcaaatcggcggctggcatgaatacgccaatggcagcatatccgctttctatgtatggtttgttcgcggtaattgcagtcgttaccacagtgattccatttgtgctaatgcttgagggcataaaacgaatcggggcacagcgagccgccgccatttcaatggcagggcctatcctgacgattttctatggagctttatttctcggtgaacggctcgggctcattcaagtcattggatgcggtgccgtattttttgtcattacggtgatggaatacaggaagctgaaaacaggaaaataagaataatttatataaaacacacacgtttttcaattacaataagtgtaattacgtgtgtgttttttgattttgtaaaggttaggtgagaagatgcagcgcatattgcttgtagaagacgaccactcaatcagtgaaatggtggatcattatttaacaaaagaaggctttggaattgtgcatgctttcgacggagaagagggcatccggctgtttcagcagggttcatacgatttggtcctccttgatatcatgctcccgaagctgaacggcatggattttctgaaaatcatccgggaaaaaagcaatataccggtcttaatgatttcggcaaaagacggagatgtggacaaggcattgggactgggttttggggcggatgatatcgccaaaccgttttcgatgattgagctgacagccagagtaaaagccgcgatacggcgggcgacgcaatattcggcagaggagccggctgtgaataaggtgatccggattcaccagcttgcgatagatatagacaatgtttccgttttgaaaaacggagagccgctccagctgacgtcaacagaatggcagctgctgtgcttatttgcatcaaatcctaaaaaagtgtttacgaaagaacaaatctaccgttccgtttggaatgaagagtactttgatgatcagaacatcattaacgtacatatgcggcggctcagagaaaagattgaggatgacccctcctcccctcaatatattaaaacgctatggggcatcggttataaattaggagagttttagaatgacagtgctatgggtggccgctgtcatcgctctggcgtgtctgaatgtgattcaattcataatgaaaaagaagcgggacgggaatctggcttacacggctgaccagcttagctacatgctcagccgggattcggcaggacaaattttgcttcctacagacgatcatgcgctcaaaggcttgcttgttaacatcaatcttatcgttgagaatcgtcagcagatcagcgctcgatttgccaaaacagagcaatccatgaagcggatgctgaccaatatgtcgcacgacctgaaaacgccgttaacggtcattctcggttatatcgaagccattcaaagtgacccgaacatgccggacgaagagcgggaaagattgctggggaagctccgccagaaaacaaatgaactcattcagatgatcaactccttttttgatttagcgaaattagaatctgaagataaagagatcccgattaccaaagtacatatgaacgacatatgcaaacgaaatatcctgcactattatgacgctgttcagtcaaaaggctttcaagcagccatcgatataccggatacgccggtgtatgcgcaggcgaatgaagaggcactggacagaatcctacaaaacctattatccaatgcgattcaatatggcgcggttggcaagttaatcggcatgacgctgtcttatgatgagaggaacatcgccatcaccgtatgggatcgcggaaaagggattagtgaaaccgatcagcagcgggtgtttgagaggctgtacacacttgaagaatccagaaataaagcatttcaaggaagcggcctgggtttaaccatcacaaaacggcttacagaaaaaatgggaggcaccatatccgtccaaagcaagccgtacgaacggactgcatttacgatcacattgaaacgcatgacatattaatcgtaagaatttcttaaggtttgagaaataaaaatgacagggctcgccgctacaatagaaaacaggaaaagagagggaaggagaaacaaagttgacttatatcgtacaaacaaacgggctgaccaaaacgtatcagggcaaagaggtcgtatccaatgtcagcatgcatattaaaaaaggtgaaatctacggctttctcggcccgaacggcgcggggaaaacaaccattatgaaaatgctaacgagccttgtcaaaccgacaagcggtgaaatcatcatccttgggaacaagttcacccacacgtcatatgaggtgctggggaacatcggcagcatgattgaatatccgattttttatgaaaacctgacagctgaagaaaatttagatctgcattgtgaatatatgggataccacaataaaaaagccatacaagaagtgctggatatggtgaatttaaaacaaatcgacaaaaaacccgtcaaaaccttttccctcgggatgaagcagcgccttggaattgcgcgtgccatcctcacgaagccggacctgctcattctggatgagccggtgaatggtcttgaccctatcggcattaaaaagatcaggcaattgtttcaagtgctgagcaaagagtacgggatgacgctgctgatctcaagccacctgctgggtgaaatcgaacaaatcgcggacacaatcggcgtcattcgggacggcaggctgcttgaagaggtatcaatggaggatgtcaggggccagaacactgaatacatcgagcttgttacgccgaatcagacaagggcctgctttgtgctggagaaagagctgcaattaaccaactttaaaattttaaatgagaaaacaatccgaatttacgaggctgaagcctctcaggctgccatatccaaagcattgattttaaatgatgtagacattgaatcaatgaacaaaaagtatacgtcgctggaggattattttatcaaattgatcaacggcaatagcatcagtgcgtaaaggaggagagacacgttgatgaatttgatcagaatcgaattaagaaaaatgaaaatgggctggtatatgagaggtgccctcattgccaacgtgatcattatgggttttatgtggctgatcagttattccgaaaaagccgatggcggggtttcgttccaaagtacggatgaagcattcctcatcatcggcaccttcgtcagagcggtatttatcgtatttggcgctgtgctgatcgtaaaattggtgatttcggaatataaaaacaaaaccattcttgtgatgttcacgtacccgatcagccgtaaaaagctgctcaccgctaagctcatgatcgcgggcggactgacgtttatcacgattttactttcaaatatactcatagccgccggtttcttttggctgaactcgatctgccatttcataccgggagagcttacttccgagatcatttctcaacaggcggtcaaaatggcggttttcgcttttggcgccgctggaaccagtttagttcccatcttttttgggatgcgtagacactcggttccggcgaccatcatttcatctgtagtaattgtgatgctcatcagctcaacaagtccgggcttctcgatttcatctgttgtgtatatcccgttatcgttagcggcattcggattgttcttttcctacatggcgatcaggaatgcggacaagcaggatgcgtaaacaaaagcgcccaatatgtataaaaggccgatgctgtcagcatcggcctttccattatgagtctgttcttgtttcaagataatgcttcttgccaatctctttgctcatcatatagaaatggaagcaatattcaccgattgccatgacgatcgcgccgaataaagccgccaacgcaacttcaccgccagtcatccctagggaaagcggcatgcccatcagccagatcacaagaaaggccaagccaaaatcagccaaagttgcaatcatattattccatctcggcaatacataaagatcgcccagcaaataagaaataacccctaacacaatcgtcattagcagcgtatcaccaaacgtgaaaccaaagcccagaccaagcaccagatacaacacaataatcgtcataatacctttaatcgcgagcgctttcacatgtgtcattacaattcctccttttgtcatttgatttgttatgtataattcctcaaatgtaaaaagttaaaccttatttcttttcggaggcgggtgcaaatctgctggggaggggtcaatgatgtgaatccaggaattgaggctgcggcgcttcgacagcggaaacgtgaagcttgtactgcaccggacgctgctttgatgcccaacagcccattatgtttgctgtttttagatgaataaatttaaaaacttctcctgtccctccgtcatcacttctgaagtaatgaaatatgatgaaaagagatcaaggggaggtgacgtgatggcggtcgtgagagcaacgagtgcggatgtcgatttgatggcaaggctgctcagagcggaagcggaaggcgaaggcaagcaggggatgctgcttgtcggcaacgttggaattaatcggctgcgggcgaattgctcagattttaaaggcctccgcaccatcaggcagatgatttatcagccacacgcgtttgaggctgtgactcatggatatttttatcaaagggcgcgagatagcgagcgtgcccttgcacgccggtcgattaatggtgaaaggcgctggccggcaaaatttagtttgtggtacttcaggccggagggagactgtccagcccagtggtataaccagccgtttgtggccagatttaagtcacactgcttttatcagccgacggcggagacgtgtgaaaatgtatataacacattttagagacaggacaccgttcaaattgaacggtgtttttatttgaaaagatgcaatggaaaatattcctgtgagataatcgaagaaaaaagagctgacggagatgacagaatggcaacaattgacctgcaaaagaaaagtgtaaagatcgtactggagaaaaagcagttaacgaaggtgacggctcgtgtcggactggttcttgatattacgggatcgatgagaccgctctacaaaaacgggacggttcaaaatgtggtggagcggattttggcagtggctgatcagtttgatgataacggtttgctggatgtatgggtgtatgataatgaattttcccgattaaagccagtttcagaaaaggatttttcgggctatgtcgatcgtgaaattttaaataatgaccgcttgcataaattcggcagaaatgatgagtcgccagtcatgaaggacgtgctgcgcaaatatgttacggaggaaccgagctcgtatcctgctttcattgtttttatcaatgacgggggctgtaaaaagtcaatcaaaccgataattgaagcttcttctgataaaccggtgttctggcagtttgtcggcatcggaaacggaaactttgattttctcaataaactggatacgttagaagggcgtgtcattgataacacgaacttcctgcatatcgaagagattgaccgcatttctgatgatgagctttatgatgctctgcttgctgaatttccattttggctgaaagaagcgaaggaaaaagggattgtaagagaacaagagcctcctgctgaaaagccgaaaaagaagggctttttcagcagattgttttcgaaataactgataaggcactgagccattctgcgaaatggctcggtgtttttgtttttttaagatcatgtgaagaaaaatagtccaaatgggcggcttgcaaacgacaggatatgcagaaaacgcgtcattcagccagctttcggcatgttttagcggcaggcttgtgagggaagacctgtttttgatgttcagcgcttacaatcagttcacacttcttcacagtcgtttaacaatgatttcctataatggagacgatcaatgaggagagaggggatcttgaatggcatacgacagtcgttttgatgaatgggtacagaaactgaaagaggaaagctttcaaaacaatacgtttgaccgccgtaaatttattcaaggagcggggaagattgcaggactttctcttggattaacgattgcccagtcggttggggcctttgaagtaaatgctgcgcctaaattctcaagctatccgtttacattaggggtagcgtcaggtgatccgctttctgacagtgtcgtgctctggacgcgcctggcacctgatccgctgaatggcgggggaatgccgaagcaagcagtgcctgtcaaatgggaggtcgcaaaggatgagcatttccgcaaaatcgtaagaaaaggcactgaaatggctaaaccgagtcttgcccattccgttcatgtggaagcggacgggcttgagccaaacaaagtgtactattaccgtttcaaaaccggccatgaactaagccctgtcggaaaaacaaaaacactgcctgcccctggcgccaatgtgccgcaaatgacctttgcatttgcttcctgccagcaatatgagcacggatattatacggcctacaagcatatggcaaaggaaaagcttgatcttgtcttccatctcggtgattacatatatgaatacggcccaaatgaatatgtatcaaaaacaggcaatgtccgcacgcacaacagcgcggaaatcattacgctgcaagactatcggaaccgtcacgctcaataccgttctgacgccaatcttaaagctgcacatgcggcattcccttgggttgtaacttgggatgaccatgaagttgaaaacaactatgccaataaaatacctgaaaaaggacagtcggttgaagcattcgtgctccgccgcgcggcagcataccaggcatactatgaacatatgccgctccgcatttcctctttgccgaatggcccagatatgcagctgtaccggcactttacgtacggaaacctggcgtccttcaatgtgcttgatacccgccagtacagggacgaccaagccaataacgacggcaataagccgccttctgatgaatcgcgcaatccgaatcggaccctgcttggaaaagaacaggagcagtggctcttcaacaatttgggcagctcgactgcccactggaatgtgctggcgcagcagattttctttgccaagtggaatttcgggacaagcgcaagcccgatctacagcatggattcgtgggacggctacccggctcagcgcgaacgggtgatcaatttcattaaaagcaaaaatctgaataatgttgtcgtactgacaggtgatgtacacgcaagctgggcatcgaatttgcatgtcgatttcgagaagacaagttcaaaaatattcggagccgaatttgtcggaacctcgatcacatccggaggaaacggcgccgataagcgggcggatacggaccaaattttaaaagaaaatccgcacatcaagttctttaacgactatcgcggatatgtccgctgtacagtgacgcctcaccagtggaaagccgattatcgggtgatgccgtttgtgaccgagccgggcgcagccatttccacgcgggcttcattcgtttaccagaaagaccaaactgggttgagaaaggtatcatccacaacaatccaaggcggggtgaagcaatccgatgaggtcgaagaggatcgtttctttgcgcacaacaaagcccacgaaaaacaaatgattaagaagcgggcaaaaatcacgaattaaggagtggaaattatgttttcaaacattggaataccgggcttgattctgatcttcgtcatcgccctcattatttttggcccttccaagctgccggaaatcgggcgtgccgccggacggacactgctggaatttaaaagcgccacaaaatcacttgtgtctggtgatgaaaaagaagagaaatcagctgagctgacagcggtaaagcaggacaaaaacgcgggctgaatgctgatgaggcagacaccgggtctgcctctttttttatgaaagggagggcttttttgaatggataaaaaagaaacccatttgatcgggcatttagaagagcttcgccgccggattatcgtaaccctcgcggcattttttctatttctcatcacggcttttttgttcgtacaggacatttatgactggctaatcagggatttggatggaaagctggctgtgcttgggccgagtgaaatcctctgggtgtatatgatgctttccggcatttgtgccattgcggcttctatccctgttgccgcgtaccagctgtggcgtttcgttgcaccggcgctgacgaaaacggagcgcaaggtgacgctcatgtacataccaggtttatttgcgttgtttttggcgggcatctccttcggatactttgtcttgtttccgatcgtgctcagctttttgactcatttatcctccggccactttgaaacgatgtttacggctgaccgctactttcggtttatggtgaatttgagcctgccgttcggcttcttgtttgagatgcccttggtggtgatgtttttaacaaggctgggcatcttaaatccttacagactggccaaagcgagaaagctgtcctattttctgctgattgtcgtatctatattgattacaccgcctgattttatttctgattttctcgtgatgatcccgcttcttgtcctgtttgaagtgagtgtcaccctatcggcgtttgtctacaaaaagaggctgagggaagaaacagcggcggccgcttagtgcagcgtaccgcccggtgacttcacatcctcatcatattgtgcggccgtaacagcggcgattctcaatgcccggacaatcgtgtccaggctgaggctcggcgctgttttgtcgattgtttgctgcggaatgtaaggaatatgaataaaaccgccgcgaatgtgcggggatgtccggctaatgtgatccattaacccgtagaacaaatagttgcatacaaaggtccccgctgtgtaggaaaccgcagctggaatgccgtgttccttcatcttagcagttattcgtttcacgggaagccctgtccagtaagcggcgggcccatctggagaaatctcttcatcaatcggctgatgtccttcgttatcggggattcgcgcatctgcaaggttgatcgccacccgttccggtgtaatctgcatccgtcctcctgcttggccgacacaaatcacgatatctggctgatgtgtttgaatggcttggcgcagagtgcccagagcggatctaaagacggttggaatttgttccgctgtaataatggcttcttccgtctcgaagccattaagccgtttcgccgcttcccatgatggattgacggtttctttgtcaaaagggtcaaaaccagtgatcagcactttttttctcatcttctcatctcctttttcttttattctattgtttatttatgggtttttcatcaaaataatgtaaaggagtgaatcataatggagcatttaccgcagcagtatcgtcatttattcccaaccttgcagacgcatacgatgcttgccagctgttctcagagcgcattggcagagcctgtatcaagggcgatccaggattatcatgacagcctgctgtataaagggacgaactggaaagaagcgattgaaaaaacagagtttgcgagaaacgagtttgcaaagctgatcggggctgaaccggatgaagtggcgattgtgccgtcagtttctgatgcactggtttctgtagcatcgtccttaactgcatttggaaagaagcacgttgtatatacagatatggattttccggcggtgcctcatgtttggcaggcacactccgattataccgtatccgtcattccatcaatagacggcgtgctgccgcttgaacaatatgaaacgcatatttcggatgaaacagtactgacgtgtgttcctcacgttcattatcgtgacggctatgttcaggatataaaagcgattgccgagatttctcagagaaagggctctttattgtttgtagatgcttatcaatcagccgggcatattcccattgatgtgaaggaatggggcgtagatatgctggcagcaggcacccggaagtatttgctcggcataccgggtgtggcgtttctttatgtgagaaaggagctggctgacgcactgaaaccgaaagcatcagcttggttcggcagagagaacggatttgatggggcttatgcgaaaggcgcgcgtcgttttcaaacgggcaccccagcttttatcagcgtatacgcagctgcagcggctttatcgctgctgaatcatattggggtttctcatatcagggatcatgtgaaaacgatctgtgccgatgcagttcaatatgccgctgaaaaaggcctgcagctggcggcggcacaaggtgggggtcagccgggcatggttgcgatccgggatgagcgggcatcggaaacggcggcgttgctgaagaagaaaaaagtgatttgcgcgccgcgggaaaatgtgatccgtctcgctccccatttttataatacgaaggaggaaatgcggcgcgcgattgatgaaatcgcggcgaaaacgatccacaagtaaacataaaaaaagcccctgaacattagtcaggggcttttcatattaatgatctaccttcacgcgcttcataaagaaagcgccaattaaaccgataatggcaacaatcattgcaaacacaaatgcgtgctgtacacccgctgtcaaagcttgcgggatgactgccggatcggcagggtttttaactgtactcatataatcatgctggcctgcagccataatgctgaccgcaaccgctgttccgatagcgccagccatttgctgcagcgtgttcataatggcggtgccgtctggataaaattcgcgcggcagttggtttaaaccgtttgtctgtgcaggcatcatgatcatagaaatcccgatcatcaagcaggtgtgcaggatgataatcagcacagctgttgaagtggtcgtgacatttgagaagaaccatagtacaacggtgacaatcacaaatcccggaatgacaagccatttcggcccgtatttatcgaacaagcggcctgtaacaggggacataaatccatttaaaataccgcccggcaagagaacaagaccagatgcaaatgcagtgaggactaagccgccttgcagatacatcggcagaagcagcatagatgacagaatgaccatcatacaaatgaacaccatgatcacacccaaaataaacatcgggtatttgaacgcacggaggttcatcatcggctgcttcattgtcagctggcggattgaaaataggataaggccgacaacgccgacaatcagcgacacgataacagtcgggctggaccatcccccggagccttcacccgcgttgctgaatccgaacacaatgccgccgaagccaatcgtcgacaggatgatagacaatacatcgattttcggctttgtcgtttcagatacattctgcatatatgcgataccgaaaacaagcgccagcacaaggaatggaagagagatccagaaaatccagtgccagttgagatgctccagaaccaatcctgagaaagtcgggccgatggcgggcgcgaacataatgacaagcccgatcgttcccattgcggcgccccgtttatgaggcgggaaaatcaccaagattgtgttaaacatcagcggcagtaaaagaccggttccaagtgcctgaacgatccttgccgccaataaaaacgggaagcttggcgcgagtgccgcgatcaaggttcctataattgaaaagattagtgacacggtaaaaagctgtcttgttgtgaaccactgcaacagcagtcctgaaacaggaacaaggataccgagtacaagcaggtagcccgtcgttaaccattggacggttgccgctgtaatgttcaattccttcataaggtcggttaacgcaatattcagtgctgtttcactgaacatgccgataaaaccggccaacagcaaggaaatcataatcggcatcactttgtattgctgagatgctttagctgttgtttccaaaatcatttcccctctctatcaactgcatgtagtatgtcgtttttttatctcttcagcaggtcaggaatgcagctggagatatgaaggagcggcgtactgttttttgccgtcaaagataaaagaatgccgccttcaatcatcgcgttaaccacagtgctggcttcttttgcacggttctcgctgcagccagtctgccgcagtttttcctcatatacagaggcccattctttgtaggcttcatgacaggcttcgcgcaacggttcgcttttcaatgacgtctcagccgctagcaagcccacaggcaagccttcaatgtcttccgtacatgaaaactggcaggagagctccttcaaaaaggcttgaatgccttccgctggatcggtgcaggcttccatgcagtccgcgattttctgacggatatactccttcatctcattcacggcttcgatcgcaagctgttctttacccccgggaaagtggtagtaaagagagcctttaggcgcgccgctttcctttataatctggttcagccccgtgccgtaatacccttgcagctgaaaaagccgggtagctgccgaaaggattttctcacgggaatctccataactcataacattcccaccttactgaattgcaatcaaaaatatagtgactggtctattatcttgattcaatcatcaattgtcaagaaaaattcattgtatgaaaagacaaaaaaagaaggatatgacaacaaaaaatactgagagaaaagctgactgatcttttgactgaatagataaaatgtacaatgattaatcatcatatggatgtaaggagagaaatagatgaaaaaacaacgaatgctcgtactttttaccgcactattgtttgtttttaccggatgttcacattctcctgaaacaaaagaatccccgaaagaaaaaacgcagacacaaaaagtctcttcggcttctgcctctgaaaaaaaggatctgccaaacattaaaattttagcgacaggaggcacgatagctggtgccgatcaatcgaaaacctcaacaactgaatataaagcaggtgttgtcggcgttgaatcactgatcgaggcagttccagaaatgaaggacattgcaaacgtcagcggcgagcagattgttaacgtcggcagcacaaatattgataataaaatattgctgaagctggcgaaacgcatcaacgacttgctcgcttcagatgatgtagacggaatcgtcgtgactcatggaacagatacattggaggaaaccgcttattttttgaatcttaccgtgaaaagtgataaaccggttgttattgtcggttcgatgagaccttccacagccatcagcgctgatgggccttctaacctgtacaatgcagtgaaagtggcaggtgcccctgaggcaaaagggaaagggacgcttgttgttcttaacgaccggattgcctcagcccgatatgtcaccaaaacaaacacaaccacaacagatacatttaaatcagaagaaatgggcttcgtcggaacaattgcagatgatatctattttaataatgagattactcgtaagcatacgaaggacacggatttctcggtttctaatcttgatgagctgccgcaggttgacattatctatggataccaaaatgacggaagctacctgtttgacgctgctgtaaaagccggagcaaaggggattgtatttgccggttctgggaacgggtctttatctgacgcagccgaaaaaggggcggacagcgcagtcaaaaaaggcgtcacagtggtgcgctctacccgcacgggaaatggtgtcgtcacaccaaaccaagactatgcggaaaaggacctgctggcatcgaactctttaaacccccaaaaagcacggatgttgctgatgcttgcgcttaccaaaacaaatgatcctcaaaaaatccaagcttatttcaatgagtattgaagaaaagaaggcgaataagccttctttttttggctttttaggaccaataatgacctctgaatcttaaaatttctttaaaaataagccaaaattaccctttacttaattaatttggtaacgtaatataattgaagaatttgttacaaaaaaaggaggatattatgaaatttgtaaaaagaaggatcattgcacttgtaacaattttgatgctgtctgttacatcgctgtttgcgttgcagccgtcagtaaaagccgctgaacacaatccagtcgttatggttcacggcattggaggggcatcattcaattttgcgggaattaagagctatctcgtatctcagggctggtcgcgggacaagctgtatgcagttgatttttgggacaagacaggcacaaattataacaatggcccggtattatcacgatttgtgcaaaaggttttagatgaaacgggtgcgaaaaaagtggatattgtcgctcacagtatggggggcgcgaacacactttactacataaaaaatctggacggcggaaataaagttgaaaacgtcgtgacgcttggcggcgccaaccgtttgacgacaggcaaggcgcttccgggaacagatccaaatcaaaagattttatacacatccatttacagcagtgccgatatgattgtcatgaattatttatcaagattagacggtgctagaaacgttcaaatccatggcgttggacacatcggccttctgtacagcagccaagtcaacagcctgattaaagaagggctgaacggcgggggccagaatacaaactaatgagataaataaccttgaagagtcctattcttcaaggttattctgctttcagcacaatggttttcgccgccatatcatgaacggtttgttttttcttcgtaaatgcggctgtcaaatagatcaggcgggagaatacatgcacccacgctatgatgtaacggacaatcgcctgtaggaaagaaattttctcgtgtgtttcgtccctcacgatttgcagcccgatgatttttttgcccagtgtgcccttccaatttgtcagcggcatcagcaaaggatacacaatcagcatcaatatggcgacaataatgacaccagcggacccatcgccaaacgtaaatccggctgccaaaatcactgctgcggcaatgattacatcaagtaaaagagcgcaggcgcgcagcatgaaaccagctagttccaatagaaacactccttaaaatgttaaataaacacctaatgattgtaaaaaagaagggcctaaagtgggaataggtgataagccttaaatcacaaaagttggtgaaaatgtcataggtaaattggcataatcagccagcttatcacattaccaaattcttttttagcccgaaaccaagccctcagaagttatttttgttaaaatagaaaagttacaacagaattcggagggtttattgtgggaaaagtgaaacgaaatgccccttgcccatgcggcagcggcaagaaatataaaaaatgctgcggaagtaaagttgtcgacttcccggcggaactagcggcaaaagaagcgaaacaaattcaggaagacttagtggagtatgccttcacagtacatagagaaagcatttcaggctttatcaaccagcatgattttctttctgctatggacagacagacgaaagacatcagcgtatttaacttaggaatctggggaatcttcttccacccgcttgctggtgagaagacaatcttcgaagagtaccttcagaaaaaaggcgattcgatcactcgtccgaaaacgcgtgagatcgtagaatcatggcagagcatgacgcctgctttattgctgctgaaggacctgaaggaaggcatcattcactttgaagatgtcattacggcaaaacaattcgaagtggaaatggacgccagcaatcaagaccttcctccagtgggaagcctgattcttggatacccaatccacgaagcggaaaaagcagaattcttcatgcagttcacgatcttcccggtgaagagaacagaagcgctgatcagcaaggtgaagaaatatgcggatgccgctgtgaaggacggcaaaacgccggaggacttcatgaagcaggaattcaacaacgttctgttcgcgttgttagctgagaaagatgaagagccacaagcagagaaagcggaagtaagcactgttgagtgggcaaacgacttggagaaagaaaccgctgcggctattgaagaaggcatgagcggggaagagtatccgactgaattgatcccagctgttattgacatctggaaaacattctgcgagaaaaaatcacctgtcatcagaaagccggaagcttttgcggcggcagttgaatattatgtaaacgcaatttctcttaacggcgcgtccgtttcccaggctaaactggcgaaaaaatacggcgttagcgcatcaacgatttccagccgttacaaagaaattgaaagcacgctgcaagatgaagcagatcgttttgcacaagcgttatcctcataatggaaaaaaccttgaaaagccaggcttttcaaggtttttttatttctgaaacggaattttgatttctaaccggaagacggggtggcggtaggtaaaatccagcctgccaaaagcgctcttcaccagtttttgaatgatatatgtgcccatgccttcatgagcgccgtttttcgttgagcggccaaacgattgataaattgtatcgagcacttttgggtccatcccgggagtgctgttttcacaagtcagtacataaagtccgctgcgcagtgaagtttccagtttaatctctgctttttctcgggcctccgctgcgctgtcgagcgcattttctaatatgttgccgaccaagctgacctgatcagcaggcgaaaacggaagggaagaaagcggtgtatgcatatgcagcgaaacactcacattcgaggcgcgggctttttctaaaaaatcataaagcacccctgcaacgtacgcgttctctcctttcaaaaaacggtcatattggctgtattgatccgcccagttttgaatatatgcttgtgtatctgccttgggctgagctgatttgattgcagtgatatgtttcattgtgtcatgattctggcttctgacatcaatcagcatttgattggcgtgctgttcagcttgagtcagcttatcaatttgatcagaaagccttgcctgcaaagcagactgtccgatacggagcccttcacaccctgcaaatatcgcgattacacataataccggcatgatgtctgtgccaatcaacactactcccgccgacatcacttgaatcacagcaatccacgcacaaagccctgaggaacagtgtttccacacccgcttcgtattccaaatgtacaatcctgcagcagctgcgcctaaagcagcggcgagccaagaggcggctgtgctgtgtgaaaaagcagcagctccctgataacatatgaaactaaataaaaccagataaagacattgaaaaagggtaatcacgttctgaactcctcaaaagtagtagttttgaaaataatcaagctgctgcttggtgatcatcgcttttttagacgttccctcaaaagaaactgtaaatgaatgcttggtataagcggaaaaatgctttatgtaatgaatgttgataataaaggaacgatgcgaacgaagaaaatccttttcgggcaggtcgcctttaatatcatttaatgtttgatacgtttgcacctcttcggcggttgtcacaatcgtcgtcgaacgtcccgtccgttctgcgaaaataatatccttcttttgcaggacatgcatttcagacttttgctttatcaatatacgcccattcaaactcgtttccgttttctttttcaagtaccggtcgaaggaagcggccagacggtcggcatagtacggcttcataatataatcatggacgttcaggtcaaaggcgtgaaccgcataaccgccgtggccggtaacaaaaatcacatccacatcaagtgaatgggatttgatcaaatcagcaagctcgtagccagacatatggggcatctcgatatcggcaagcagcagatcaatgtctccgttctttacccgcctgtaggcttccttcgctgaatcggtggaaaagacaatttcgacgtcctgcattctggacacgatcgcttccagcttctctaaatctactcgataatcatctacaagtccgacttttaccattatcattcccctagttacatagaatcatctttattctatcccatttcgcgacataaaaagaactcttcgcgacaactttatccaactaatccagcttttcgtatatagtcattactagaaataaagataagggagattgtgacatgattacactgaccgattgcagccgcaggtttcaggataagaaaaaagtagtcaaagcggtgcgagatgtaagtttaacaattgaaaaaggagaagtcgtcggcattctcggagaaaacggtgccggcaaaacgacgatgctgagaatgattgcttccttgcttgaaccatcacagggtgtaatcacagtagacggctttgacacggtcaagcagccggctgaagtcaaaaaaagaatcggtgtcttattcggaggagaaaccgggctttacgacaggatgaccgctaaagaaaatctccaatacttcggcaggctgtatgggctgaaccgccacgagatcaaagcaagaatagaagatttatcgaaacggttcggcatgcgcgattatatgaaccggagagtgggcgggttttcgaaagggatgaggcagaaagtcgccattgccagagcgctgattcacgatccggacatcattttatttgatgagccgacaactgggcttgatattacgtcaagcaacatcttccgcgaatttatacagcagctgaaaagagaacaaaaaacgattcttttctccagccacattatggaggaagtgcaggcgctctgtgacagtgtcatcatgattcacagcggagaggtgatttaccgaggggcgcttgaatcactatacgagagcgagcgcagtgaggatttgaattacatctttatgtctaagcttgtcagggggatttcttaaatgctgagccatatttataaaaaagaaatgatcgacgctttgcgcgacagaaaaacgattttactcacaatcttagtgccgatgattatgatgcttggacttgtcttcttttatgaaagcatgctgtccgacaaaggggagcagtacacgctggctgtcggccattcgctgccgcccgcactggaaagcaagcttaatgagattgacgaaatcagcgtaaaaacatttgcaaagcctgaagaggcagttgatgaaggaaaagcagatgcctatctgaacgtcccaaaagagttcgactcatatgtcaacagcatgacaccttttaaggttgatgtttacggcaattcaatcgatcaagggtcgtcaaatgccatgcagcttgtgcagtctgccttagatcagtacaaaaatgaaattgtgcagcaacgtttaacaaataagcatattgatcaatcggtgatccagccgtttacaattcagcaaaaggaagcggatgaggagaaagggacttccgctattatgctttccgccattctgcccatgctgattctgacttccattgtttccggcgcaatgccgatcgctcttgatatcatggccggtgaaaaggaccgaaagtcaatcgaggcgctgctattaacgccagtcagcagaaacaaaatgctggtcggcaagtggcttgcggtttccacttttggcgtggcttcaggtgtattggctttgatgtttttgattttgtccaccgtgttatttaccgaaaatttaaaaacggccttccagctgggagatcatatgtggagtgtaatcggcgcttcagccttaatcattgtgctctctgcattgctgatatctgcgatggagcttttcatcagcatcatgtccagctcggtaaaagaagcgcaaagttatatgtctctcgtcgtctttctgcctgtgttcccgatgtttttcatcttcagcaaggcaccgaaccaatttgacttatcatactttctcatcccgtttctgaacctgcatgcgttatttaaacagcttttattcgggatggttgacccggctgccattttgtctacgtcaggaaccatcgccgtgctcatcgccatcttctttttactagccagagcctgcttcctgaaagacaaatgggttcttccaaaataaacttgcgaaaggagaaatacactttctcctttttgtatatcctgaaaaaagaaggaaaatagaaaaaggatatctaatacaaaaagtgaccctgcactatttttcatcaaaattggtttcaaaggagaaggaacaatggatcaaacacgtacactcggcaaaacgaagctgaaggtgaagcggatcggattcggcgcgaatgcggtcggcgggcataatctatttccaaatctaaatgatgaaacagggaaggatttagtgcgcacggcattggatggcggcgtcaattttatcgataccgcctttatatatggattggggagatctgaagaattaatcggcgaagtcgtacaggaacgcggcgtgcggaatgagctcatcatcgccaccaaaggagctcataaagaagtggacggcagcattgaattagacaatagccgggagtttcttcgcagcgaggtcgagaagagcctgaagcggctgaaaacagattacattgatttgtattatgttcactttccggatggaaaaacacctctcgctgaagtggcgggcactttgaaagagttgaaggatgaggggaaaatcaaagcaatcggcgcttcgaacctcgattatcagcaattgcaggattttaatgctgatggctatttggaggtcttccaggccgaatattctctcatacagcgtgatgccgagaaagagcttcttccatactgtgaaaaacaaggcatctcctttattccttactttccgcttgcgtccggactgctgacaggaaaattcacgcgagacacagtctttgatgatttcagaaaggataaacctcaatttcagggtgaaacgtttatccacaatctcaaaaaaatagataagctgaaagcagtagcggaggaaaaacaagcggatacggcacatgtcgccttggcgtggctgttaacgagaccggcgattgatgccattattccaggagctaaacgacctgagcaattacaggataacctgaaaaccttgaacattgaactcaccgaagacgaagtgaatttcatcagcgacatttttaaataaaaaggaaatagccgtcaaggctatttccttttggtgttttattctttgatgaatgcttcgactaattctgctgctctgtaatcatccatatcaagctgccattggtcgatgtcatttttcttcattttcacttcaactgttttttcagatgaagcaggtccaagctttttaaattcctcagggtagacttgaagcgcgtatttcactgcctcttcatagctggcactagagtttttactgtagtagtctttcactttgtcttcgatacggtctgaaagagaagatgcatctacaggtttaactgttgcttcaacaattgcttcgtctttagagattgaagtcgtttttgcttgaatggaagagtttttgcttaatccctctttaatgccgttcacgatattatcaagcgctttgctgtccgcatatgtgctggaaaggccggaagctgagagataaccgtctttggctgattcattgaaatcatttacaatttcatttttgttagcgccggtgattttttcgaaatcggcgttatctttgccgaaaagaaggacatcaacataagctgataacgcttttgcagaatcttggagcttatctgccgtcgccaggatttttttgtcttttccgtcaattttaaaagtaactgattttggctttttatcaccgtaagattccggcgtatagttaagctcgtattgcttgcctttatctacaacgaagaaaagatttccttcaacggatttgtcagcgttaatcgtgctgccttgaagcttttcgctatagtcttcagggtctgtgtcagacattttggtatcaccttgatacaatgtgaaatccatactgtctacattcagcgggtcttttcctgtgtttttcaccgcgacattgacttttaacacaagctggtcatctgaagtggacttatcatatttagacggaagtgtgtaagagacatccttgattttgacttgagctatatctgagcttttttctgtttctgattctttcttctccgcgcttgttttgctgccggaacaagcagctgtaaacatcatcagcagaagaattaggaaaacagcgtacgtttttttctgaaacattcatttttcctcctcaaatggtttaggaaaggggagtcttttgtctttgagaaatggatctttttgaatggattagcatcatataaccaaaaaaatcagttcttttctcacggtttttaccggattttctggaaactccgccctcctttgtcatgaatggacctataaaaagttacaacggaattaattttaagattattagcttttatattgaataggttcatcatcctatttttggtgaaaaatgttctggtaaaactggtaaactcagaaaactgtgtattttagactattactttttgattagttggagggaacttaagaaggatgaaaggggctgcctttgtgaagaaagagggactgaaacaaaaagcactggaaatcggccgggtgccgacacacttaaaactggaaattgaagattatggcggtgatgacaaaagagcctatttttgttggagagatcctcaggatgagaatatcggcattatcgtggaacttggaccggacggggagctggaatccctttcccgtgatattgagcctgaaagcggagaaaggctgtctgaggagaaactagaggatatcatgcgccaatttgtcgagactcatcatccgggggcactctctgcctttgttcgtgaagaaaatgaccgtgcatacggcgataaagtgagattttcatatgttcaaatggaggctgggcttcctctccccatgagcggatttatggctgatgtttccttatcaggtgagatcgtttacttccgctattacggcgaagcaggcagcatcatcaagccaaagagggtcgcggatgttgaagaggcacttgcctttatcaagaaggacgtagagttcgaccttttgtttgaggttctccatcgttctgtttacaaaaatggagatgatcagccacatttggtgtatgagcctgaatgtagggcgattaccgtacctgcggatttggttcaagaagaacaaggaggagttgatgatgacgataattacagggagcctgagagctttcctctccctttattcgagggcatccgcgaaaaggccgatcctgacagcatgattggtattgaaaatgggtttgtcaaagagcgggaagcggatttgggagatgggagaatcggaatcgtttggcggaatccggatgaccctgtgtatcagccggcggataaaagcatggacagctggtttaagggacggactcatcaagtgctgaaaaccatctataacaaagaaaccggaaaactcgaaggcgtcatgtcatttatggaggaaaaagggccgctgacagtaactttggcagagtgcgaaaaaattgcgcttcgctttctgtttgctttatttccgaatgccgatcaatattttaggatcagatacgatgaaaaggatgaagaagaaaacgcagtcactgtttttacatttgaaacgcattgtcacggagttccgctccgatttgggcagatcaaaatttgtgtcagccgccagacagggtatatcaccgtttatatgggaccggatattgacccaaatgagctggcaaccattgatcctgtgccggccatttcagttgaacaagccaaggctatcttttggcagcattttaaagttgagcttggctgggaaagagagtacggagatgatgaagaacacagctaccggctcgtctataagccggtgtatccgcgttttatcgatgcacatacaggagagcctgtcttcagctcatggtaaaacagccaaaagtcacgcaattgcctcaggtatagaagagagtacgtgatgaaagtaacagaaagaatctcgaaaaacaatgacaataatagaaaaggacctttcttcactttaaaagaagaaaggtctttttatataataaacaggattctctttgtcgtagactctttgaaagggatgacttcattggttaataaacagctgaaaaagatggcgcaggagatcggaaatgtaccgacgcattatgagcttgagatagaagattacgaccaaaagcaaaagaagaacgggcaggcatattttatctggaaggaccctaaagatccggaaaggcacattacagttgaacttagaaatgacggcgctttgctcaccttttcaacaactgtccgctccgagacagacaaaaaacttccagatgctgagctgaagctgacggctcttcagtttgccgctgcccatcatcccggcacatttatgaattttcattttcaaggcaaggaagaacgggggcagcacatccggtttgtctataccaaaatggagctggggcttccgattcccaattcaggctttttaattgatatgacacgcagcggtcagattgtccactttctatattacggggaagggcataaagccgaagttccgacggaatttgtagcaaaagagaaggttgtgtcccattacttaaacacaatgtcttttgagctgatgtacgatgtcattgatggcgaacaggaaccaaggcttgtatatgaaccgattctcccgggatacagctatcccgcagatgtagacgaaattgtgcccgatcagcatatcgcagatgaaagaatagaaaacacggcgtcactgccgccgcttcagaacaaggaagaagttgatatatttgccttgctgggttttacctctgatatgcagaaagtcagtgaaagagactttggggaacaaattggaagcacgtggcgcaggggcgctgcgccggagcgtaaggatttaagcataggaagctattttgaaacgagaaataaaaacacaatcaaaatgaagacggataaaagaaccggaaaattaaaagcagcgctttcttttatggagcggccgaacaaccgccaatgctccacggaagaatgccaagagatagcgcttcaatttttgtatgccctctatccgagagcggctgagtttttcagggtgaatcccgtccgaattgatgaaagagggagagtccgcaaccatttttctgtctggtataaaggagtgccgctgcggttcggcgctgcccgcatcattgtcaatccggaaactgggttgattgacgcttttatggcgcctgatattgaacctgaacaattggaagcgataaatcacaggccggatgtttccgctgaagaagcaagagaagcgtttttagccgcttttgatgtgaagctggaatggcagcctgattttacagcaggcagtgaccagcactacaaacttgtctataagccggtttacccttcatatattgatgcgcacataaggaaaaagaaaaggctgtgaggggtgtctagttaggaatcatctccaagtgggggtagtccttgaatcgtttccaatccccgccccattcaaaaccgagtgtcttagcgatctcgacaacctccagccaatctgattttccgttttgattgccgtcatattccatatcccatatgatgcttccatcctttttttgaagggcgaaatcaatcgctaaaccatagttatgatacgattcccctcctcttgcataggtgacaatattccctttttttgtacgtccctgtttatataattcatcttgttccttaaaggacctgaatccttcagtaatgacgacggtaatgcctttattcgctgcagcggctttgagtgcatcggcattctgcttcacaatcggatgaagatccgaggggacaggcatgtcctgcagggcgttttgagaatgccattcatgccgaatataactaaaacaaagatctagaagaaatagaatacataagataacaaatgtttttgcgggtaacttcatatcggtctcactttctcaagatgtgctgaatgtgaacgcttttaagtgattgactctctctaaaagcgaacagctatgataaaatataacataaatagtagcaggaggaaggaggcagaccgatgagagcaaagattccatcagaagaagtagcagtaaagctgaatgaatggtacaagctcattcgcgcatttgaagcagatcaagcagaagcgttaaagcaggagattgaatacgatttagaagatatggaagagaaccaggacttgcttttatatttttctttgatggaattccggcatcgaatcatgcttgataagctgatgccggtgaaagacagcgacaccaagcctccgttctctgatatgctgaacgaaattgaaagcaatcagcaaaaactcacgggcttattggaatactacttttattatttcagaggaatgtacgaattcaagcagaaaaatttcatattagcgatcgaccattataaacatgccgaggaaaagctcgagtatgtcgaggatgagatcgaaaaagctgagtttctttttaaagtcgcagaagtgtattatcacatcaaacaaacgtatttttccatgaattatgcgagccaggcgcttgatatctatacgaaatatgaactgtacggtcgccgccgggttcagtgtgaatttatcatcgccggaaatttgaccgatgtgtatcatcatgaaaaagcactgacccacttgtgcagcgctttagatcatgccaggcagcttgaagaagcatacatgatcgccgctgcctattataatgtcggacactgtaagtacagtctgggtgattacaaagaagcggagggctatttcaaaacagccgccgccatttttgaggagcacaactttcagcaagctgttcaagctgtattttcactgacccatatctactgtaaagagggaaaatacgacaaggcagtagaggcttatgaccgcgggataaagagcgcggctgaatgggaggatgacatgtacttgacgaaattccgcctcattcatgagctgtatcttggaagcggcgacctgaacgtgcttacagaatgctttgacctgctggaatccaggcagcttcttgctgacgccgaagatctgctgcatgatacagcggaacgtttcaatcagttggaacattacgagtccgccgctttcttttaccgcaggctgatgaatattaaaaagaagcttgccgagcagcgttttcaataggaaatggcagagaactacaggttctctgctttttttgtgctgttttcaactcggaaaaacagggtattttccactgcatagtgagaaacagaggaggatatcaagtatgtacaaagatttaaccggaaaaacagcgattgtgacagggtcttcaaaaggaatcgggaaagccattgcggaacggttcggacaggagagaatgaatgttgttgtaaactaccacagcgacccgtctggagccgatgaaaccctggaaatcattaaacagaacggagggaaagccgtcgcagttgaggcggacgtgtcaaaagaagaggggattcaggcgctcttggacacagctttagagcatttcggcacgctcgatgtgatggtaaacaactctggttttaacggcgttgaggcgatgccgcatgagatgagtcttgaagattggcagagagtgattgatgtcaatgttaccggaacctttctgggagcgaaagcagcacttaaccacatgatgaaaaacaatatcaagggcaatgtgctgaatatctcaagtgttcaccagcagattccgcgccctgtaaacgttcagtattccacatccaaaggcggcatcaagatgatgacggaaacgctggcgctcaattatgcggataagggaatccgcgtcaatgcgatagcgcccggcaccattgccacagaatcaaatgttgatacgaaaaaggaagagagcaggcaaaaacaattgaaaaaaatcccgatgaaagccttcggaaagcctgaagaagtggcggcagcagcagcttggctcgtatctgaggaagcaagctatgtgaccggcgcaacacttttcgtcgacggcggaatgacactttatccatctcagcttgaatagaacacaaaacagggggattgcgggatgaaaacggactggtggaaggatgcagtggtgtaccaaatttacccgagaagctttcaggacagcaatggagacggaattggggacttgcgggggattatttcccgtcttgactacataaaggagctcggggcagatgtgatttggatttgcccgatctatccttctccgaatgttgattacggctatgatgtgacaaaccataaggcgattatggattcttacggaacaatggacgattttcacgagctgctggaccaggtgcatcagcggggattaaagctggtgatggactttgtgttaaatcacacctcggtcgagcatccgtggtttaaagaagcggagctggacaaaaacagcaaataccgcagctattattattggcgtcccggcacaaagaacggcccgccgacggactggctctcaaactatggatgcccggtctggcaatacgaagagcacaccggagaatactatctccatatgaatgccgtcaaacaagctgatttaaactgggaaaatcccgaagttcgccaggcggtgtatgacatgatgaaattttggctcgataaaggggtcgacggtttgcgaattgatcagctccatctcatttctaagaaagaatatcttccttcgtatgaggactatatcaatcagcaggcagagccgaagccctttcagccaaatggcgaacaaatccatgactatttaaaagaaatgacagatgaagtgttttcccaatatgatgtcatgtctgtcggagaggttggcagtgtcacaccggaagaaggcctgaaatatacgggaacagataagcatgagctgaatatgatttttcactttcagcatatggagcttgatcagcagcccggaaaagaacattgggatttgaagccccttgagctttctgatttaaaatcggttttgacaaaatggcaaaagaagcttgaacatcaaggctggaatacattgttttggtgcaaccatgaccagccccggattgtgtccagattcggagacgatggggaataccgcaaaacatcagcgaaaatgctggcagccgtactttattttatgaagggcacgccgtatatttatcagggagaagaaatcgggatgacaaacgcgccgtttacccggattgaagactacaaagatatccaaacgatcaatatgtatcataaacgggtgtttgaaaaaggctatgatccaaatgatgtgatgagatcgatcttagccaaaagccgggatcacgcccggaccccgatgcagtggaacagcggcaaaaatgccggatttactgacggcacgccttggctgaaggtcaatccaaacttcaccgcaatcaatgtggaggaagcgcagggagatcctgattcggtcttaatctattacaaaaagctgatcagcctgagaaagcagtacgcggacctcatgaaagggagctttgatcttttgcttccggatgatccgcagttgtttgtatacatgagagaaaacagtaaacagcagcttttgtcggtcaataatttttcaaaagagcaggctgtttttcagtggcccaagaactgcggcaaagctcaggcctctctgcttctcagcaattataacaacgatgatcttgctgacgaaatggtgttccggccttatgagagcagggtctatcttctggacaaaacaaactaatgattgaagtagcccggcatttttagccgggttttttagtacatatattcgctctgcaggcgggaagaataaatgaaaatgaaatttattcttgcaaaacgtaatgacttcggtttattatgatataggattacaaaatcgttatcattttgatttaaagtttctgaaaaagaggggatatacgatatgtttaaaaaatggagcggtttgtttgtgattgcagcgtgctttttattggttgcagcatgcggcaactcatcaacaaaagggtcggcggattcaaagggtgataaactgcacgttgtcacaacgttctacccgatgtatgaattcacaaaacaaattgtaaaagacaaaggcgatgtggatctgttaatcccatcttccgttgaaccgcatgattgggaaccgacgccgaaagacattgccaacattcaggatgctgatttgttcgtttataatagtgaatacatggagacatgggttccgtcagctgaaaaaagcatgggccaaggccatgccgttttcgttaatgcaagcaaaggcattgatttaatggaaggctctgaagaagaacacgaagagcatgatcatggggagcatgagcacagtcatgcaatggaccctcacgtatggctcagccctgttctggcacagaaggaagttaaaaatattacggcgcaaatcgtgaagcaggacccggataacaaagaatactatgagaaaaatagtaaagaatatattgcaaaactgcaggatcttgataaactatatcgtacaaccgcaaaaaaagcggagaaaaaagaatttatcacgcagcatacagcttttggctatctggcaaaagaatacggcttgaagcaggttccgattgcagggctttcacctgaccaagaaccgagcgcagccagcttggcaaagctgaaaacatatgccaaagaacataatgtaaaagtcatttactttgaagaaattgcatcctcaaaggtcgcagatacgctcgccagtgaaatcggcgcgaagacagaagtgctgaatacactggaaggcttgagcaaagaagaacaggataaaggtttagggtatatcgacattatgaaacaaaacctcgatgccctgaaagattcactattggttaaatcataagatagtgtgcgccggagggtgcacactatttctttgtgagaaaggaagattaacatgaatctcgtctcattgaaagatatcgttttcggctattcccatacgcctgttttagataaagtatcacttgatattgaaagcggtgagttcgtcggcatcactgggccaaacggcgcctctaaatcgacgctcataaaggtaatgctcggcatgctgaaaccgtgggaaggcacagtgacgatcagtaaaaggaatacagaagggaaacgcctgaccatagggtacgtcccgcagcaaatttcttcatttaatgccggctttccgagcacggtgctggagcttgttcagtcaggccgctatacaaaagggaaatggtttaaacgtttaaatgaagaagatcatcttgaagtagaaaaagcactgaaaatggtggaaatgtgggagctccgtcaccgtaaaatcggtgatttatcaggcggacagaaacagaaaatctgtatcgccagaatgctcgccagcaacccggatctgctgatgctggacgaaccgacgacagctgttgattacgacagcagaaaaggattttacgaatttatgcatcaccttgtgaaaaatcacaaccgcacagttgtgatggttactcacgaacaaaacgaagtacagcaatttttagataaagtgattcgattagagagaggagaaaaaggcggatggaaatgtttgacttggaattcatgcgacgagcttttctagcaggcggcatgatcgccgtcatggctccgatactaggagtgtatctcgttctcagaagacaggccttaatggctgacacactttcacatatctcattgtcaggtgttgccatcggcttttttctcagcaccaatataaccgcagcaagcatagtcgtcgtgaccatcggggcgatcggaattgaatacatgcggcgggcgtatcggacttattcagaagtgtccattgccatcttaatggcagctggtttgtccttcgcgatgtttttaatcagcctttccaaaggcacagccaatatgagcatcgatcaatacctatttggatcgcttgtgacagtaaaccagcagcaggtctatattatcagtattatcacactgctgatcctgctttattttatcgtactgagaaggccgctctacctgctgacgtttgatgaagcaacagccaaaacatcgggaatcaatacaaacgttctctcgttgtcattcagtattgtcacaggccttgcgatttcagtcattattccgatcatcggggtccttcttgtatcggccctgctcgtattgccggcagcattcgccatcagaattgcaaaaggctttaacatggttttcattacagccatactcatttcattattcagcgtatttacgggactgacatcatcctatcagctcgggacgccgccaggtccgtctattaccctgctattgatcgttttgctattaatcggatttgcagttcagggagtttggacgtttatcaaaaaagaagctcagcgcaaaaaaaggcaccgataacatgaaaagcagttttccctagggaaaactgctttttttatagaaacaatccggcaaggcgctcataagattcttttttcgcctcaaaatcaaacacattgcacagaaccatgatttcatttgtttcgtagcggcctgtgaggtctaacagctgttgtttgacagtggttggagaaccgatcaccatccgctttctgttttcttctatgagttttttatcggacgctgtgtagggataggctttcgcctcctcgatgcttggcacgcggctgtccaagccttttccgacgcgaagaagccacaaatcctggcttaatgcgagttcttctgcctcttcatctgttttcgcgcaaatgacaaaaatcgtaaacagtgcggacggattcgaaaaatgggctgagggccgaaagctttcccggtagatgcggaatgcattttctcctcgctcgggattaatgaaatgcccaaatacatatccaatcccctgttgcgccgcgcgtcttgcgctgttttcaccaagaccgagcacccatagctcgggtgccgtgtcaataaggggcgccgctttgattccggcatacggatggtcgggaggaagggaatctgttagaaaataagagacatcctgcagctgtctgttaaattcggttaagctttttttcaccccgtccgttaatgcaagcctggtttttgtcgtgccgccgggggaacggccgacgccgaggtcaatccggtttggatacagggcctcaagctggcgaaaggtttcagccactttaaatgggctgtattggggcagaagcacgccgcctgatccgacacgaatggtgtttgtctgtgctgcgatgcgggcgatcatgatttcaggcgctgtgcttgccagtcctttcgtgctgtgatgctcggcaaaccaataacgcttatagccccactcttcactaaatcgagcaagctcaaccgaatgctgaagagttgtcacagggccctctcctttagaaacaggagcctgatcaagtatgcttaaatgaatcaaaaggccgcttcctttctgtctgtttttagatggtgacaccagaataggcaaaatgacttgcccgcgtcaaatggtttgtttaagaagcgcactttatagcatttgcaaatcatatatcaaatatggaagttttttttcgaggtttttcgtcaattattcttaacttttacgaaactttgatataataacaaacgtatatattagtaatttacggcttattttccttgtgagcgtaaaaataaatgtgactatcttcacattttgatgagtaggagtgaatcgtgtggcaatttctttagaaaaaggtcaacgaattgatttaacaaaaggaaaagccggtctgtcaaaattgatggtcggtctcggctgggacccagtgtcctcaggcggagggttcttcagcaaactgcttggcggaggcggtccgaatatcgactgtgacgcttcagtgctgatgttggaaaacggaaaattcaccgataagaaaaacctgatttatttcggcaacctgaaaagccgctgcggcggtgtacagcatacaggcgacaacctgacgggtgacggtgcgggcgatgacgagcaaattatgatagatttagataaagtgcctgcaaacatcgataagcttgtatttgtagtaaacatttacgattgtgtcagaagaaaacaagatttcggcatgattcaaaatgcgtttatccgcgtagttgatcaatctaatcacgaggaaatgctcaagtacaatttgagagacaattacgccggcagaacaagcctgattacagcagaaatctaccgcagcggcagtgagtggaagtttgcggcgatcggtgaaggcacgaacgatacgagattagaagatattatcagccgatacgtataaaagaaaaggagtggatgaaacatgacaatttcattggcaaaaggacaaaaagtagatttaacaaaaacaaatccgggtctttcaaaggttgttgtcggtttaggctgggatacgaacaagtatgacggcgggcacgactttgatcttgactcaagtgtgtttctgttagacgccgcaggcaaatgcgcgtcaccaaacgactttattttctacaaccagcttgaaggcggcaacggttcagtcgttcattcaggcgacaacctgactggtgctggcgaaggcgacgatgagaatgtaaaagtaaatctcagcgctgtaccggcaaacattgataaaatctcatttgttattaccattcacgatgcagaagcgcgcagccaaaactttggacaagtatcaaacgcgtttgtccgcatcgtaaatgaagaaacaaatgaagagctcatccgttacgatcttgcagaagatttctctattgaaacggcaatcattgcaggggagctttacagacataacggcgagtggaaattctcagcaatcggctcaggctaccaaggcggccttgcccgcattgcaacagactacggtttgcaagtcggttaagacaaatacgaagagcagaaaggagagaggcagtatggccattcaattatcaaaaggacagcgcattgatttaacaaaaacaaatccgggactgactaaagcggtgatcggcttaggctgggatacaaacaagtattccggcggacacgattttgacctggatgcttcggcctttttagttgatgcgcatgataactgcgtaaatgatctcgatttcgtcttctataataaccttgaacatccgagcggcggtgtcatccatacgggtgacaaccgcacgggtgagggcgacggagatgatgagcagattatcgttgatttctcgaaaatccctgctcacattgagaaaatcggcatcacagtgaccattcacgacgctgaagcacgcagccaaaactttggacaagtttccaatgcatttgtccgcgttgtggatgaagaaacgcagaatgagcttcttcgcttcgatttgggagaagacttctccattgaaacagctgttgtcgtttgtgagctttacagacacggcggcgagtggaaattcaatgcgatcggcagcggattttccggcgggctggctgcattgtgccggaattacggtttgcaagtgtaagcgagtgacaaatagagaagtcaccgtttcaaattaataggaggaaaaaacttggactttttacatcatattttgtctacgtatgcttcatttttcgattggaaaatgtggggggaagttctgactgatcctgtttcctggggtttgatcggttcccttgttgttctggaaggccttttatcggccgataacgcgcttgttcttgcggtcatggttaaacacctgccggaaaaacagcggaaaaaagcgttaacgtatggtttgtttggagcttatattttcaggtttattttcatcgggctcggtatgcttctcattaaattctggtggatcaaggtgcttggcgcgctttacctggcttggctcgtcattaagcacttctggattggcgaaaaagaagaggaagcggacggcatcaagaaaaactcttggatggtccgcacgttcgggatcttctgggcgactgtcatttcagtagaattaatggatcttgccttctctgtggacagcatcctagccgcgtttgcagtatctgaaaaagtatgggtgcttctgatcggcggtatgcttggtattttaatgatgcgtacagtggcaaaagtgttccttgtgctgattgataaaattcctgagctggaaaacacagcattcgtgttaatcggcattatcgcgctgaaaatggcggggagcgctttccattacgaaatgccgcactctgtattcttcattatcattatcgctgcatttgcggtaacattgatcattcactacatcaataaacaaaagcaggtgcgcgaacaaacagccgcttcaaaagaagaataaaacaaaacaaggagggaggttcaatgtccttccttttttgttaccgaaatatcgttcaatgacaaaccggaaaggaggatatgatgagacaagaagaactaaccattcataaagcacttccggctgatggcgattggaaaagcctgctgtttcagccattgccggagcgggatcactatgaaactgcacaaggcctttctttttctcgtcttgccggtcagatattgggcacgcctattgatgagacggactactataacgagctatatgagctgtctgtaaacgaccgcataacgattttgagtgaaacgcttgataaaacaatcgaaccggaaacatttcaaaagcttcagcatattcattccatcaatcagaaagaaaaagggctgtcagtcagccgctttgttgcctttctggacggggaaaagctgattgcgaagcactcaaatcccctgatgcaccgccatttaagaaaagcgctgatgacgcttttacatacctttgcggacagtcatgaaaaggggctgaatcatcctgattttcgcagagtgctgcttgatgtctcgaagttttccttaaaccatctgaacccttggctggaaaaaaccgatatagagcgggagatgccgaaggttgtttggtatggagatgcgacgaaaagccagctctatttcttatattatctgatgctggtcggctgtgatgtactgctgttccatccggcgggaacggatcagctggcgcttgtcgacccgaagcaggagctcggttttacggaaaagctcccggatgtttcggagcttcagccgttcccgaaagaaaaaccagaccggaaatcaacagtggcttaccgctcaacaaaggaaattgaacatgtgctgaatcacgaggaatccatgctgtataagccgtggcagttcagagatcacacaccggtgtccgttacgctgaaaacgacctatgatgaattgtttttaatcacgaaagaacgcgcctttattcggccgaatttcaaagctgataaacattcaattgagattccgaatgtattcgccaaaattatgggcgtgtcgaaagacaataaggaatattggaacaggcttcatactctagcggattatcaggaaacagaaatggtcagaagctttccatttacagaagaaataaagtcgaactatcaatttcactacagccacgcacttgatcaagaagggaacattgatccggacaagctgatggcaagcaatgtgtggcagtacaaacagctgccggcgggcgttcagactgccattgccaaaacgatttcgagaatgtgcaggcacccgcggcttaaagctttgcatcaggaacaagtcaaggatgttcaaatctatttgtttaaacaaacaacaaatctgcctgctaatctgctgaaattgattcaaatgttcgactatgcgcaaaccgttccgaaactcgttttatatcatacggaaatgagcggcggactcacgcgttcggatgctgctgccctgctgttcctgaatgaaattggaatcgatatcatcatttataatccgcccggacaccaagatattgagcagtttattgaagatgaccagtatgatatccactggctggatgacatggtgtttcagcaggactacaaagagccttcgcttgtgaaaaggctcttcagaaccattacccaaaaataaggagagaagaaaagcatgacaacagaaaatcaaaatccgcttgttctcgataaaaatgaagagatttcccagcaaaaagctgacgatatccgtcttcagcttcgtcaggaaccagaagtgaagcggcttgctcaacaaattgacgtcaaaaaccaaatggagctgcttgagtacggcaaggagccggccgttgaaatatccaagttctctgaccgcatcttagggatgatgaaaacaacaagcgtgacagactccggcacaatgctgactcagcttgggaaaatcatggaccgcttcgacaaaaatgattttgatgagccaaagggattaatggcgaaaattttcaaacgcggcggcagcatgattgaaaaaatctttaaaaagtatcagacgcttggcggagagattgaaaaaatccacgttgagatttcaaaatacaaagatgagatgacgaagacgaactacacgctcgatgaaatgtatgaaaacaatatcaaatactatatggagcttgaaaaatacgtcgttgccgggcagatgaaactggaagagatgcagtcgatccttccttcatatgaggaaaaagcggcaagcgggaaccagctggcgcaaatgcagctcgatacgttgcgcaacggcattcaggcgcttgaggaacgggtgtatgatctggatatggcacggatggtggcgcttcaaactgctcctcaaatccgtctcctgcagcgaggaaatgcaaagctgatcgggaaaatcaactccgcgtttatcattaccattccgattttcaaaaacggcattattcaggctgttacggtaaagcggcaaaagcttgtggctgattccatgagcgagcttgaccgccggacaaacgagatgctgaaacgaaatgctgaaaacatctcgagccaaagtgttgaaattgccagaatggccggcagaccgagcatagatattgaaacgatcgaatcgtcttggaacacgattgtcagcggcatgcaggaaacaaaacaaatcgaagaagaaaacaagcgcctccgcgaagacggcgcgagacgaattgcacagcttcaggataatattaaaaaagcagcattgcagcaataagaaaaaccccgcttgtggaacataagcggggtttttcaattacatcatttagttaatgacaatgtgtaaagacaggtgtaaacttaaacggtaatcattttgcatatcagaggtgttggcaatgggaaaacaacagcctatatcccagcgtaaactgctgggcgtcgccggtttggggtggctgtttgatgcaatggatgtcggaatattatcgtttattatcgccgcgctccatgtagagtggaatctgtcgcccgaggaaatgaaatggatcggaagcgtcaattccatcggcatggctgcgggtgcgtttttgtttggtttgcttgctgatcgaatcggccgcaaaaaagtgtttatcatcacccttttatgcttttccatcggaagcggcatttccgcttttgtgacgagcttatcggcatttctaatccttcgtttcgtgattggtatgggacttggcggcgagcttccagttgcttcaacactcgtttcggaagcggttgtgcctgaaaagcgaggcagagtgattgtgcttttggaaagcttttgggccgtgggctggctcgcagcggccttgatttcttactttgtgataccaagctttggctggcaggctgccctgctgttaactgcgctgactgctttttatgcgctgtacctgcggacgagtctgcctgattcgccgaaatatgaatcgctttctgccaaaaagaggtcggtgtgggagaatgtaaaaagcgtctgggcaagacagtatatacggccgaccgtgatgctgtcgatcgtttggttctgtgtggtgttttcttattacggcatgttcctatggctcccgagtgtcatgctgctgaaaggcttcagcatgattcaaagctttgaatatgtcctgctgatgacgcttgctcagctacctggctatttctctgccgcatggctgattgaaaaagcgggccggaagtggatactcgtcgtttacttgattggcacagcaggaagcgcctatttcttcggaacggcggattccttaagtcttctgcttacggctggaatgctgttatcgtttttcaatctcggtgcatggggcgtgctgtatgcttataccccggagcaatacccgactgcgattcgagcaacaggttcaggaacgacagcagcgtttggaagaatcggcggcatcttcgggcctttgcttgtcggaacgctcgcagcccgtcatatttcgttttcggtcatcttttcaatcttttgcattgcaatcttactcgcggttgcttgtattttgattatggggaaagaaacgaaacaaactgagctagaataggaaaagcacctcttgaatgaggtgctttcgcgtgtcgacaaaccctcgcattcgttgtcaggactgcgcttcggtgctcaatgcgaagtggatcaacggctaaattctcaggcgtcctgcctaaacgccgtcgtcatcacatcctgtgaatgtccgctcctatgctcgtccttcctagacttcaagggttttcaatcacgctgaaaaaatgacaaaattctaaaatgaaaaccattttagaattttgtcaacaatctgaggtacctctgaatgaggtgcttttttacaattgcgcccgggctgcggattggcgtttcccggttttactaattgtctggtagagcgtcatagaaagtatgaacagaatggcagtaaatcctgtgacagctccgaaatgctgtgtgctttgatataaaaaacctgcaatacttgtaccgacagtggttccggcatacatagcggcattggaaagggaagcaatggttcctcgcgcatttggtgcaatggattgaaagacacccatcattaacggaaagatgatgccagctgtaaagaacgtgagaaaaaagccggcttctactaaaaacaagtttggaaagaacggaagagcgaaatagagagcgcccattagcagcatcccgctgatcagtgttttaaacatgcccagcttttctgaaacccggctgccgataaggctcccgagcatatttcccagtccgagtacaagcatagctgcgccaatttgtgacacggttaaatgataatccgcggaaagccaagtacccagaaagctgaacgatgcgaagtttccggtttgaaacagaaaataggcaagcagaatgaccgatgttttcggcaatgaaaaaagctcccgataggggttgacaattgatgggcgcgccaatggttcagaaggccggatgccaggcatgaccgccgccaggatcaatagaagaataagcgagcacgctgacaaaacgaaaaatggcgtatgccatgtaaaggaagcgagaaaccctccaataggaagtccgagcatttgtgaagcggccaaacctgctgtcgcaatccccatgccttttatgatctgagaaggctggacaatgactgggatggacgcccaaatttgaggcgtcacaaacgcagcgctaacgcctgcggcaaaacggaacaggcacatggcggcaaaagagggagcgatgccgcataaaaacgtggatacaataaagcctgcaagtccccacagcatgactgttttcctgttcagccggtctgagattgggcctgcaatgaaagcgaagagcgcataaccgagtgcataagcactgaccatccagcctgacaaatcagtagagacatgaaactgatcctgtaaaagggggagaagcggcgaaagcaaaaaggtatccgtgccaatgacaaacatgacactgaagaaaagccaaatgcgattcaaatttatcactcctattgttttataactttgaaactatgaaacagatatgtatagagaaaaccctttgttagagggtttccaaaaagccaggcaggtatgtttgaaatgtgtcttcacgcagactgacgtattttgtccgcgaatctttccgggttgccgtcaatcccgcttcacgcagcgttttaaaatgataagatgccgtggttttgacaatattgcacttttcacctacttcaccgcagctgagttcttttccgctgacataaagcgtacgaataatggcaagccttgattcatcagacagtgctttaaaaatttgcgctctgatttgatcatctgattgtttcatagtcatgaaactataatacataatgggtgttgaaaaagcaacttatttttccagtaaaggagcaggaagtcataagaggaaggaggaattcaattccaataaaagcgttttcaactaaagataggcgaaaaatcacccgtaaaatacaatcatataggaggattacagagcatttagaagcataaataagatcatgtggtcacatggatgtttataaagaaatggtacagaataaaagagaatatgctgtttgtgtaggaagttacataaatgttacggtaataaagattgcttaatatggagggaaaatatgagtgtagatgagaaaccaattaagataaaagtcgagaaagtctctaagatttttgggaaacaaacaaagaaggcagttcaaatgcttgccaacggaaagacaaaaaaagagatcctgaaagcaaccggatcaaccgttggggttaatcaggcagattttgaagtatatgatggtgagatatttgtcatcatgggtctatcagggagcggtaaatcaactttagtacggatgttaaaccggcttattgaaccgactgccggaagtatttacattgatggtgacatgataacaaatatgtcaaaagaccagctccgggaagtccgccggaagaaaatcagcatggtcttccaaaagttcgctctgttcccgcacagaacgatacttgaaaacacagaatacggactggagcttcaaggtgtagacaaacaagagcggcagcaaaaagcgcttgagtctcttaagctcgttggactggaaggatttgaacaccaatatcccgaccagctttccggcgggatgcagcagcgtgtcggccttgcccgcgcgttgacaaatgatccggacatccttctgatggacgaagcgttcagtgcgcttgatccactgattcgtaaagatatgcaggatgagcttcttgatcttcacgataatgtcggaaaaacaattatctttattacgcatgacttggacgaagcgttgcggatcggcgacagaattgtcctaatgaaggacggcaacatcgttcaaatcggcacgcctgaagaaatcctgatgaatccatctaacgaatatgttgagaaattcgtcgaagatgttgatttgtctaaagtcctcacagcaggccacattatgaaacgcgctgaaacagtgcggattgataaagggcctcgcgtagcattgacactgatgaaaaaccttggaatttcttcaatttatgcagtggataaacaaaagaaattattaggtgttatctatgcgtctgatgctaaaaaagcggctgagtctgatttgtcacttcaagacatcttgaatacagaatttacaactgtaccagagaatacgtatctgactgagatttttgacgttgtgtccgatgcgaatattccaattgcggttgtggatgagaagcaaagaatgaaaggaattgtcgtaagaggcgcgctgattggcgcacttgccggcaataacgagtatatcaatgctgaaggcactaacgaacaaacacaagatccttctgcacaggaggtgaaataagatggatagactgcctagaatacctttagcagatattattgaccgttttgttgactggattacgatgacgtttggcggattcttcgacggaatcgctaacggattggccgcttttgtaaatggaattgtcaccggtcttggatttattccatctattttgttaacgattattttcgccgcacttgcgtggtggatcagtacaaggggaattgcgttatttacgttgattggattcctcctgatcgattatttaggatattgggacccaatgctgcaaacattggcgcttgttttgacatctgtgattatttcgattgtggtcggggttccgatcggaatttgggcgtctcagaaagaaacggttcgccgtattgtaacgccaattcttgatttaatgcagacaatgcctgctttcgtatatctattgccggcgattttcttctttaacatcggtgttgtgccgggtgttgttgcatctgttatcttcgcgatgccgccgacaatccgcatgactgttctcggtattaaacaagtgccggcggatttgattgaagcgactgaggcattcggttctacaacagttcagcgtttgtttaaagttcagcttccgcttgcgacaaaaacgattttggccgggatcaaccagagcatcatgcttgcattatcaatggttgttatcgccgcaatggtcggtgcaccgggacttggttctgaagtatacagtgccgttacacagctgaaaaccggggtcggagtagaggccggtatcgccatcgttatcgttgccattaccctggaccgtattactcaaaatattaaagtgaagaagaaaagcagggggaatgcctgatgcttaaaaaaatcatcggcatcggcgtttccgccatgctggcgctctcacttgcggcttgcgattcagaaaacgatgaaaatgcatccgcagcagaacaggtgaataagaccatcatcgggattgaccccggttcagggattatgtccctgactgacaaagcgatgaaggattatgacctgaatgactggacattgatttcagcgtcaagtgctgcgatgaccgctacgcttaaaaagtcatacgaccgtaagaaaccgattatcattacaggatggactccgcactggatgttctccagatataagctgaaatatctcgatgatccgaaacaatcttatggcagcgcagaggaaatccatacgatcacacgcaaaggcttcagcaaagagcagccgaatgccgcaaagcttctgagccagtttaaatggacgcaagacgaaatgggcgaaatcatgatcaaggtggaagaaggcgagaaacctgccaaagttgctgctgagtacgtcaataaacacaaggatcagattgccgaatggacaaaaggcgttcaaaaggtgaagggagacaaaatcaaccttgcctatgtggcgtgggacagtgagattgcaagtacaaacgtcataggcaaagtcttagaagacttgggctatgaggtaacacttactcaggtagaggctgggccgatgtggactgcaattgcgacgggaagtgcggatgcatcactttccgcatggctgccgaatacccataaagcatacgccgctaaatataaaggcaaatatgacgatattggcaccagtatgactggtgtgaagatggggcttgttgttcctcaatatatgaaaaatgtcaactcaattgaagatttgaagaagtaatcaaaaaagcagcctgtgtcaggctgctttttttgcgttattttacgtaagcggcagcgggtgaatcagccttttgaaaagtttttaatacggcattcgctaaaatatgaatgccggtaaacatcgcgtttcggtcaaaggtcatgtgcggatgatggagccccggctggagcccgcagcctagtccgagcatcgttgttttcagattcggcaccttcacggcgtaaaaatggaaatcctctccgccggtagtgacaagcgggtcatcaagccgctcagccccgatgatatctgtaatggcttctgccatgatcgcttcagcttctttgttttgtgttgccgcaggaaggctgtgttctttttgcagctcgatttttgcgccgaatgcagcggcggccgcttcacaggctctttctgtctcggcgattaacgcctccatggcttcattggtctgtgcgcgcaaatcaaggctgaacgatgcttttcctggaatgatgttagagctttcaccgccggcttgaagttttgtcattttgacggtatgcgggatttgcgggtcaatatgaatgagtccgagcttatgtacaagaaatgccgcaatttcaatgctgttttttccgagatgcggacgggcgccatgagcctcttccccgatgatcgttccctcaatgtgctggcttgatccgtgcagaatagacggagcgcagcggccgttctgtgtttcctgaatcgggcggacgtgaacgccatacaaatagtcgatatcatcaagcacgccttcttctatcattttcaaggcgccgccgcctttttcttctgccggctgaaagataaaacggattgtgcccttcggaagctcaggttgtttttttagcagcattaatgtgcccaatgccattgtcatatgtgaatcgtgtccgcaggaatggttggcgcgaaatgtgccgttaacctcctgccacagcgcgtcaatatcagcgcgtaccgctacaacaggtgagcctgagccgatttcgccgacaaccccggtgcagtctgaaaacgtgcgcgtccggcaccctaaatcctcaagcttttgtttcaaaaatgaagttgtctcatattccttccagctgacttcagggttcgcgtgcagatgctcgaagatgtccataatggtttgtttcatgtcttctgaaagcttttgcatggtaagaaatacctccttctatcagaatgaatttttaccttctttactttatttatattgaaacaggaagataggctgtatataatatagcacatattgctactattcagaataattaatattttcaaacagaggggatggatcgaaatatgagtatgccagcagccgaaacacagcctaagaaaaaacgaatgacatttaaaatgcctgacgcttatgtcctcttatttatgattgctttcatttgcgcaatcgcttcatatattgtgccggcaggtgaatttgaccgcgtgacaaagggggatgtcacgaccgctgttccgggaagctatcattccattgaacagtctccggtcagcttgatcagcttttttacttctctacaggatggaatggttggatcagcacccatcatctttctgattctattcacaggcggcaccattgctattctagaaaaaacgggtgccatcaatggcctgatttacaatgtcatcagcaaattccgcacaaagcaattattatttatttgtattgtcggcgcattgttctccattctcggaacaaccgggattgtcgtgaattcagttatcggttttatccccatcggcctcattgtggcacgatccttaaaatgggacgcagtcgcgggagccgctgttatatacatcggctgctacgctggatttaactccaccatattatcaccgtcaccgctcggtttatcacaatcaatcgcggagctccctcttttctcaggaatcggcctgcgagttgtgatatacatatgctttttgctgtcttctattatttatatctatttgtatacgagaaaattaaaaaaatcaaaagatgccagtgtgttaggaacagattggttccctgcggcaggaatgggcgaagccggtaaagaagaagatcagtcagtgccgtttaccgttcgccataagctgattttggctgtggcgggactctcacttgtcggatttttatacggcgctttgaagcttggctggtcagattcccaaatggctgcgacatttatttttatttctgtccttgccggtttaataggcgggcttgcggcgaacgatattgccaaaaccttcattacgggctgccaaagtcttgtatacggggcgctgattgtcgggatggcacgaagcatttccgttatccttgaaaatggaaagcttctcgatactgtcgtcaatgctttggcttcacttttggatggattcagcccgattgccggggcaatcggcatgtatatcgccagtgcgctgcttcattttctcatctcttcaggttctggcgaagccgttgtatttattccaatactggcgccgctcgctgatttgatgggaatcacgagacaggttgcggtggaggcagttatgcttggagaaggggtcgtcaactgtgtgaacccgacatccggcgttctcatggcggtgcttgccgccagcggtattccgtatgtcaagtggctgcggtttatggtgccgcttgctctgatttggttcttgatcgggcttgtctttatcgtgatcggcgtcatgatcaattgggggccgttttaacgattgctgcccgccggcttgtacggcgggcttttgagttattcattgcagaagcgcaggctgttattgtaacatgtaagccataagccattcgtaaaagtgcgggaggaaggtcatgaataatctgcgtaatagactttcaggcgtgaatgggaaaaataagagagtaaaagaaaaagaacaaaaaatctggtcggagattgggatgatagcgggagcatttgcgctgcttgatgtgatcatccgcggcattatgtttgaatttccgtttaaagaatgggctgcaagccttgtgtttttgttcatcattatcttatattactgcatcagggctgcggcatctggaatgctcatgccgagaatagacaccaaagaagaactgcaaaaacgggtgaagcagcagcgaatagaatcaattgcggtcgcctttgcggtagtggtgcttacgatgtacgacagggggattccccatacattcttcgcttggctgaaaatgattcttctttttatcgtctgcggcggcgttctgtttctgcttcggtatgtgattgtgaagctggcttacagaagagcggtaaaagaagaaataaaaaagaaatcatcttgaaaaatagatggtttctttttttgtttggaaagcgagggaagcgttcacagtttcgggcagctttttttataggaacattgatttgtattcactctgccaagttgttttgatagagtgattgtgataatttaaaatgtaagcgttaacaaaattctccagtcttcacatcaggttgaaaggaggaagcggaagaatgaagtaagagggatttttgactccgaagtaagtcttcaaaaaatcaaataaggagtgtcaagaatgtttgcaaaacgattcaaaacctctttactgccgttattcgctggatttttattgctgtttcatttggttctggcaggaccggcggctgcgagtgcagaaacggcgaacaaatcgaatgagctaacagcaccgtcgatcaaaagcggaaccattcttcatgcatggaattggtcgttcaatacgttaaaacataatatgaaggatattcatgatgcaggatatacagccattcagacatctccgattaaccaagtaaaggaagggaaccaaggaaataaaagcatgtcgaactggtactggctctatcagccgacatcgtaccaaattggcaaccgttacttaggaactgaacaagaatttaaagaaatgtgtgcagccgctgaagaatatggcataaaggtcattgttgacgcggtcatcaatcataccaccagtgattatgccgcgatttccaatgaggttaagagtattccaaactggacacatggaaacacacaaattaaaaactggtctgatcgatgggatgtcacgcagaattcattgctcgggctgtatgactggaatacacaaaatacacaagtacagtcctatctgaaacggttcttagaaagggctttgaatgacggggcagacggttttcgatttgatgccgccaaacatatagagcttccggatgatgggagttacggcagtcaattttggccgaatatcacaaatacatctgcagagttccaatacggagaaatcctgcaggatagtgcctccagagatgctgcatatgcgaattatatggatgtgacagcgtctaactatgggcattccataaggtccgctttaaagaatcgcaatctgggcgtgtcgaatatctcccactatgcatctgatgtgtctgcggacaagctagtgacatgggtagagtcgcatgatacgtatgccaatgatgatgaagagtcgacatggatgagcgatgatgatatccgtttaggctgggcggtgatagcttctcgttcaggcagtacgcctcttttcttttccagacctgagggaggcggaaatggtgtgagattcccggggaaaagccaaataggtgatcgcgggagtgctttatttgaagatcaggctatcacagcggtcaatagatttcacaatgtgatggctggacagcctgaggagctctcgaatccaaatggaaacaaccagatatttatgaatcagcgcggctcacatggcgttgtgctggcaaatgcaggttcatcctctgtttctatcaatacgccaacaaaattgcctgatggcagatatgacaataaagctggggcaggttcatttcaagtgaatgatggtaaactgacaggcacgatcaatgccaggtctgtggctgtgctttatcctgatgatattgcaaaagcgcctcatgttttccttgagaattacaaaacaggtgtaacacattctttcaatgatcaactgacgattaccttgcgtgcagatgcgaatacaacaaaagccgtttatcaaatcaataatggaccagagacagcgtttaaggatggagatcaattcacaatcggaaaaggagatccatttggcaaaacatacaccatcatgttaaaaggaacgaacagtgatggtgtaacgaggaccgaggaatacagctttgttaaaagagatccagcttcggccaaaaccatcggctatcaaaatccgaatcattggagccaggtaaatgcttatatctataaacatgatgggggcggggcaattgaattgaccggatcttggcctggaaaaccaatgactaaaaatgcagacggaatttacacgctgacgctacctgcggatacggatacaaccaacgccaaagtgatttttaataatggcagcgcccaagtgcctggccagaatcagcctggctttgattacgtgcaaaatggtttatataatgacgcgggcttaagcggttctcttcctcattgagggcaatgctagaggggacttaccgaaagaaaccatcatagatggtttcttttttgttcataaatcagacaaaacttttctcttgcaaaagtttgtgaagtgttgcacaatataaatgtgaaatacttcacaaacaaaaagacatcaaagagaaacataccctggaaggatgattaatgatgaacaaacatgtaaataaagtagctttaatcggagcgggttttgttggaagcagttatgcatttgcgttaattaaccaagggatcacagatgagcttgtggtcattgatgtaaataaagaaaaagcaatgggcgatgtgatggatttaaaccacggaaaggcgtttgcgccacaaccggtcaaaacatcttacggaacatatgaagactgcaaggatgctgatattgtctgcatttgcgccggagcaaaccaaaaacctggtgagacacgccttgaattagtagaaaagaacttgaagattttcaaaggcatcgttagtgaagtcatggcgagcggatttgacggtattttcttaatcgcgacaaatccggttgatatcctgacttacgcaacatggaaattcagcggcctgccaaaagagcgggtgatcggaagcggcacaacactagattctgcgagattccgtttcatgctgagcgaatactttggcgcagcgcctcaaaacgtgcacgcgcatattatcggagagcacggcgacacagagcttcctgtttggagccacgcgaatgtcggcggtgtgccggtcagtgaactcgttgagaaaaacgatgcgtacaaacaagaggagctggaccaaattgtagatgatgtgaaaaacgcagcttaccatatcattgagaaaaaaggcgcgacttattatggggttgcgatgagtcttgctcgcattacaaaagccattcttcataatgaaaacagcatattaactgtcagcacatatttggacgggcaatacggtgcagatgacgtgtacatcggtgtgccggctgtcgtgaaccgcggagggatcgcaggtatcactgagctgaacttaaatgagaaagaaaaagaacagttccttcacagcgccggcgtccttaaaaacattttaaaacctcattttgcagaacaaaaagtcaactaaccgcaactttagagtaaagggctgattgtcaatgtgggagcagttgtatgatccgtttggaaacgagtatgtgagcgcacttgtggcgctcactccgattctcttttttcttttggctttaactgttttgaaaatgaaaggcattcttgcggcatttcttaccctagccgtcagtttcttcgtctccgttttggcatttcatatgccggttgaaaaagcgatttcttctgttttgttaggaatcgggagtgggctgtggcctattggctacatcgtcctgatggcggtgtggctgtataaaatcgcagtgaaaaccgggaaatttaccattattcggtccagcattgccggcatttcgcctgaccaacgattacagctattattaattggtttttgttttaacgcgtttttagaaggcgcggccggttttggtgttccgattgcgattagtgcggcgctgctcgtcgaacttggttttaaaccgttaaaagcggcagcgctctgcttgattgcaaacgcagcctccggagcctttggggcgatcggaattcctgtcatcacaggggcgcagattggtgatttgtctgctcttgagctgtcacggacattaatgtggacactgccgatgatctcatttttaataccattcctgcttgtattcttattagaccgaatgaaaggaatcaaacagacatggcccgctcttctggttgtgagcggtgggtatacagcggttcagacactgacaatggcggtgctcgggccggaattagcaaacattttggctgccttattcagcatgggcgggcttgccctcttcctccgcaaatggcagccgaaagagatttaccgcgaggaaggggccggcgatgctggtgagaaaaaggcataccgtgccgctgacattgcgaaagcgtggtctcctttctacattttaactgcggcgatcaccatctggagccttcctgccttcaaagcgcttttccaagaaggcgggctgttatatcaatcaacgctcctgttcaaaatgccttttctgcatcagcaaattatgaaaatgccgccgattgcgccatctgccatgccgttagatgcagtctttaaagttgatctgctgtcagcgactggtacagcgattttagcggcggtcatcgtgacagggctgttcagcaaaaagttctcctcccgggatgcctttgcttccctgaaggagacaggaaaagagctgtgggtgccgattatgacgatctgcttcgtgatggggtttgccaatctggccaacttcgcagggctcagctcttcaattggattagcattggcgaaaacaggagacctgttcccgtttgtcagtcctgttcttggctggattggcgtgttcattactggttctgttgtcagcaataatgctttgttcggtcatttgcaggttgtcaccggagcgcagatcggtgcgggttcagacttgctgttagccgcaaatacggcgggcggtgtcatggcgaaacttgtttctcctcaatctatcgccatcgctgccgcagcggtcggccaaacaggcaaggaatctaaactgtttaaaaagacagtggcgtacagcctgattctgttagtgattatttgtatatggacgtttattcttgcaagatttggagtgtaatagaaaagagcagtacatgcccagcatgtactgcttttttatgttaatttgctttctttgtcatttcggctgttgttttcactctggctttccccataaataaaatggtaaccgccgcgaggacaattggaatcaaagcgagcaaaaacacatacgtaatacttgatgacatcgcgtcaataatgcgattcaggatcgcatcaggaatctgggaacgtgttccagcttggaatatctcctgcgggtcgccaatattttgcgcagcacctgatcccgctgagcctttcatcccgctgaaggcgtcggtcagcttgttcgtgaatacgtttgtttgcaccgttccgaaaatggtgacgcctaaggtcatgccaaatgatcgcaaaaatgaatttgtagagtttgccgttccccgaaagcgaggttcaagatcattcatcgatgccgccggcagcagggagaagttaaagcctacaccaaagcctgaaatcatcataaagactgtcagccatacccgtgctgtgtcaggcgtcatattggaaagaagcagcatgccgataaagaaagctataacagatatcagcatcaaattgcggaagcttgccttcgtttggaagatcccgccgatcatgcttccgatgactgatccaatcatcatcggcgtcagaatgaagcccgcgcttgtcgccgagctgccgtagaccgcctgaacgaaaatcggaataaataccgctaaaataataaatgttccgccatacaggaaagcgagaatctgtgctgtggcaaacaagcggttcttaaacatccagaaagaaataatcggctcttctgcttttctctccacaataaaaaaggcaatgaagaaaacggcgaatacaataaacagcccgatgatctgaatggaattccaatcgtatgttttgccgccaagctcaagggcgaacatcaggcatacaatggatacgactaaggtaatcgcgccgccccagtctattttctgctttctgtgctccagagattctttgtagtagcgaataatgaaaaacaatgacaatgcgccgatcggcacattgatgtaaaacacccagtgccagctgatcgaatctgtaatgatcgcgcctaagagcggaccaagaacactggataatccaaatacagcaccgaacatgccggacatttttccgcgtttttccggcggaaacaaatcaaagataatggtaaaggcaatcggcaggagcgcgccgcctccgatcccttgaatggcccggaagatgatcagctgattcatcgtctgggcaatcccgcataaagcagaaccgattaagaaaaaaataagtccaaacaggaaaaaacgttttcggccgtacatatcggaaagcttgccgtaaatcggcatgccagccataaccgccaccatataggatgccgtcacccatgcaaatttatcgaaacttccaagatcggctacgatattgcccatcgcggtggcaacaatcgtattgtccattgcagacatcaagatgcccagcaggagaccgaggaccacaaatttggtggaagcctgttttgctgttgttgtgtccatttgttctacctcctcttacttttctatgtaagttctgatatcatgataatagtttgattgttgaatatctcgattatcaagataaactcgattttatagggaggactgtcagttgtcaacaagaaattccagaagtgagttggaaaagactgctgttcagctttttcgaaaactgggcacaagaacggttctgtttcatcaggcagccgctcaagctctcggtctgtttcccaccgatttgaaatcagctgacattttaaatgaagcagggccgatgacggccggagaactgggaaaaaaaaccggcctcagcacggggtcagtcacggcgcttgttgaccggctggaaaaagcggggtatgtggctcgtgaaaaggacccgaatgatcgcaggagagtcgtaatcgtccctttgactgcttcgaaaaaacatataaaggatttgttccgtcctctgtctgagtcaacgatggatttgtgccgcgaatatacggaagaggagctggaactcattttcagttttgtaggcaaagccgccgatattatggaggaagagcttgaacgtctgaaacagtaagtgaatttgtgcatagcttggcccgttcccgaataaattgtacaagttacataagagaagggagtacgggccggtgaacatttttttgagctatattgtgctgggactgtccttgtctgcgcctgtggggccagtgaatgcggcgcaaatagacaaaggaattaaaaacggtttttggcatgcatggattttcggtttaggcgccatgacagcggatgggctgtacatgctttttatctatttcgggctgtcacagtttttgaccgctccatttgtgaaaacgtttttgtggctcttcggcttttttgtcctgacctataccggaattgaaacgcttaaaaacgtcagagaaccgatggatgtgcgaagctcgcgggggaaaccgtcatacaggaaaacattcgcatcgggttttctcatttcattgtcaaacccattgagcatccttttttggcttggaatttacggaagcattcttgcgaaaacagcagaggcctacaatatgaatcagcttctaatctatagctccggcatcatgatcggcattttaatctgggatttctgcatggctatcacagccagtacgttcagaaacctgcttcatgaaaagctattgagaggattgaccggaatcgccggtgtatccctccttgtgtttggcttttactttggttatcagggcatcaaacagttattgggctgattcatgaaggacagtcacctgccgcttccagttttaatatagtatccagatgatactggaggtggatcaatggtgaatgggatttacaccaaaagttttctggaacgtattcaggaagagcttcctgaatggcaaagaatcgcttttgagctgctggcagaaactctgggggacgacgcggatacgtttccgtgcattcccggacgccaggcgtttctgactgatcagcttcggattgcttttgccggagatccgcgggaaaaccgcacagcggaggaactggctccgttgcttgcggagtacggcaagatatcgcgggacacgggaaaatacgcatccctcgttgtgttgtttgatacaccggaagatttggcggagcattattcgattgaagcgtatgaagagctgttttggcgctttttaaatagactgagtcatcaagacgaaaaagaatggccggaagacattccggccgatcccgagcattataaatgggagttttgttttgacggcgagccgtactttcttctctgcgctacaccggcgcacgaggcgagaaaaagccgaagctttcctttttttatgatcacgtttcagccaaggtgggtgtttgaggacctaaatggatcaactgcatttggccgtaacatgagcaggctgatccgatctcgtttagaggcctatgatcaggctccgattcacccgcaattaggctggtacggaggaaaagataatcgtgaatggaagcagtatttcctccgtgatgacgaaaaacaggtatcgaagtgcccgttttcttatttaaagaacatgttcaacaaaatgaaataaatcaaggactggcagggcgatctttatgaccctgctttttttgatagatcatggtaacgatggcgatgatcacgagaaaacctatgctgacgaaaaaaccgggccggcttgatttttcaaacaatgtaccggacacagccgcagcaatcagaaccatcgctaaataaatttgcgtttttcccatgccctcgggatcagtcagctttttgctggagaacaggataaacagccaagtgtataaaagcataagccccgcagctgttgtcatatgctcataaatgtttttaggcagcactaacgacagaataatggagagaacaagccccgcaaacgtcagcccaagtgccggccagcatatttttttgccttcctttagagtaaagcatttcggcgcgtcgccgtcatcagccatcgtacaaagcaatgtcgtaaccgcaaatagcgaagcgacaagggtcgagaacccggcgataatgaaaatcccgttaaatatatcaaggatgatctcaaggttgtatccttttaacgacgtaatgaacgggctgtcctgttctgtaaacttgtgtaacggaaccaaaagcagagccagcccgattgaaatgatataaataatcgccagcgttgccagcatcagtttccctgatttagacgcttcctcaggtttttttaagtgaaccgccatcagccccatgacctcaatcccgccaaaagcgtaaaacgcgtagattaaacctgtccacagccccatggcgccgtatgggaaaaactcactcgtcttatttggaacatgtatgccatgatttccgccggacaggataccgcataaagccaggatggcaatgacaataaacataaaaatagcagctgttttaatgactgccagcacgttttctgttttttcaaagacggacaggccggtgaaaataataaggagccccagtactgcatagattgaggcaaacacccatagcggcacttgaggaaaccaatgcttcgtaaatagcgaaatggctgtcagctggcttccggtaatcagcatttctgatgtccagtacacccagccgttgctgaagcctgcccatttgccgaatgcttttcgggcatacgcacaaaacgagcctttttccggctgcttcgccgatagcttggcgagctgttcaaagacaaaatacgtaccgatccctgcgatcagaaatgaaaggagaacggaaaaaccgctttttacaattgcgatgctggaaccgagaaagaagcctgttccaatcgtgcagccgactccgatcagtgacagctgccaccaagccagattcccttttggctggtctttttttgtttggctcattatttattcaaccccttttatctaaggttagattgtgatctgtccaaagcttatatacatcggatttttgcctctttttacatggagaaggaagcggacgctcatactaatgaaaaaaggagcaaaccaatgacacagcaatatattgtggagccgaaaaaagggcttgggctgaagctgaaaaagggtcagattttaaaggtggttgatgtagaagggcagcaggtggctgattttgtcgcataccatgccaaggatttttatgaacaccttgatcagggagcgacgatagacgccaatcactccattcatgtgaaggtcaacgaccatctctactccaacctgtataagccgatgttaaccctgattgaagatacggtcggcaagcatgatctgctgttgcccgcctgccgtcctgatatgaacaggctcttatatgggaagcaaaaggatgagtttcaggatacgtgctatgacaatatgaaccgtgcgcttgagcagtttggcgtaccgaagcctcacatgcattacccatttgcgatttttatgaatactgtccttgatgagaaagggaatctgtctgtggaaacgccgctttcgaatgccggagattatgtaaggctcagggcggagatggatttaattgtcgcgttttcttcctgcccgattgaaaaagggaaatgcaatggcgacagtgtgacatccatacgggttgaagtcagctgatctctcttgttcactgtgaatgaagacctgtgctatatttaatagggatacataacagtcatgattcattttcattgatttggggaaatgatcagtaacaagggaaaatgtacaggaggaatgattgggatgagcatgcaggaaaagattatgcgtgagttacatgtgaagccctcaattgatccaaagcaagaaattgaggaccgagtcaattttttaaaacaatatgtaaagaaaaccggtgctaaaggctttgtattgggaatcagcggcggccaggattcaacacttgcgggaagactcgctcagcttgcggtggagagcattcgcgaggagggcggagacgctcaatttatcgctgtccgtcttccgcatggcacacagcaggatgaagacgatgcccagcttgctttgaagtttattaagccggataaatcatggaagtttgatattaaatcgacagtcagcgctttttctgatcagtatcagcaggaaacaggcgatcagctgactgactttaataaaggaaacgtaaaagcaagaacaagaatgatcgcgcaatacgcgatcggcggccaggaaggccttcttgtgttaggaacagaccatgctgctgaagcagtgactggtttctttacgaagtacggtgacggcggagcagacctcctgccgctgacaggcttgacgaagcgccagggaagaaccttgctgaaagagctgggtgcaccggaacgcttatacttaaaagaaccgactgccgatctgctcgacgaaaaaccgcagcagtcggatgaaacagagcttggcatttcctacgacgagattgacgattatctcgaaggaaaagaagtatcagcgaaagtatcagaagcgctggaaaaacgctacagcatgactgaacataaacgccaggttccggcgtctatgtttgatgactggtggaaataagttgaagaaagcccgctctcggagcgggcttttgtcgtgtacagaagctttatttgatgcggatatgattcagcttgaccattaatctgtcggcgaaccttcggaggctgcctctcgtatcaggatctaatgggagttcggctctcgcggcaatgttctctgccacatcctgaatcgacaggttgtctgtttgaatgtggtcctcaaaaatgggtgatgataaaccttcaatgcagcggtcaatttgtttggcggcccaggagttttttccttctgctctggtgcgcagcctttttaacaaggtttcctttgaagccattagtgtaaagtggtgaacgatcctgccttcatgcctgagcctgccgatgatctcattgaagtattcaggatgtacaatcgtcataggcacaataatgatgccgcggtatgtatctgtcagagaagctagaaaactgtaattgaacgcccgccataagggatagctttgaaaatcgtcctttgcgatctcctgcggcaccatggagcgcagcgcaaaacccattttctcgggatcatacacgtaagatgggtttagccttctgtgcagttcgaaggctgtttgtgtttttccggaaccgaatgccccgtttatccaaatgatcatcgccatttctcccttcctattcatcatacagaaaaagacccttcaatcgaagagtcagctggaaaaacaataaaggcggaaggttttaacgcttttttgcgtcgaagtattaaaatacctgcagaaatgttgtacaatgaatgtcattcaggcaaaaatggctaaacaacaaagcgcactttaagcttggaccggtaaagccggtatctatataaatattcgttaaataagcatataatgaagataaaatttcattccttaggaggatttcgccgaagatgaacgctaaacgagccatcccagtaagagaaagaaatatcgtcctgatcggattcatgggtgtaggaaaaacaacaatcggccaattggtcgctaaaaaattatatagagattttattgatattgaccaagagatcgaaaaggatttcaatatgacaattcctgagatatttgagaaaaagggagaagactttttccggaaaacggagaaggaatatattttagacatctgccatcataaacgattcaaagtcgtatctctgggcgggggatcttttaaacaagaagaaatcaggaattgctgtctggaaaactgtctcgtgcttcatctggacctgtcatgggagaactggaagcagcgcgcggatttattgatcgaaagccgccctgtactgcataaccgttcaatggatgaaatggaacagctgtttaacgaaagaaaagtcatttatgacaagcacaattcaaaagtggcaacagacaacctttccccggaagaggttgccgattacattgttgagacattaaaaattggctgggatctttatcagccgatgtaaaaagccgtgcgcagcgcacggctttttttatcgttttatcccttgtatcaaaatcgcttttaaacaaaaggagatgggctgtccgttttggttcaatgtaatacagaacgtgtcgcgtgcttcgtctgatgcgtgattcaagtgggtaatgatttgtttttctcggtcagcgggggttccgcctcgtttgatccagctatcgtattgaatcggcaagttccacttttggatgtcttgataggccagttgattggcgctgaacatcgactgccattctgataatgagctttctcgaacatgggaagggtctcgaagccggttcaaatgattgacaaactcatcaagaatgggatcttcaggcgcgtaatgatcaactaagagaaaacgtccgtcctcttttagtacgcgtgcaacctcgctgacagctttgcggacatctgaaaaatggtgggctgcgtatcggcaggtgatgatgtcaaatgaatcgtcggggaaggggagtgactctgccgttccttgctgaaagcgtacgttttcagctcctttttcttgcgcgaaggaggacgcaacctcaaccatctctttcgtcgcatcaacaccgatgcactcctgtacataaggagaaaatgccagggccgtatggccggcgcccgctccgatatccagcacccgatgctctgcccggcattccgctgttttgatcatcaaccccaaatcttccccctcggcaaataccttttcatcccgatacatctcggcgtttttagaaaacggtgtttcattagtcatttgaaccagctccttcttttcgtaaatgatgatatggattatgttagcaatttctgttatgattcgtccaagatataaaaatgatgaaaacgataggttcaacctatggaggctgaaatggatattaaagtgatggaatatgcagcggaaattgcccagcgccaaagctttacaaaggcggcggaacatcttcatatcgcacagccgtctctcagccagcaaatcaaaaagcttgaggctgagctagggcttaccctttttcacagatcccatggctctgttacattgacaccccacggcaggcgtttcattgaaaaagccgaggacatcattcgttccagagatgatttgcttcgggaaatgcaggagcgatcacagggaatcggtcataaattatccatcgggattcctgctgtaacagggagatatctctttcctccgctgctgaagcagtttttggcgcgctatcctcatgtggaggttcagcttgttgaaaaagattcggtttcattagaggagatgacggcaaagggagaagttgacctttctgttttatccttgcccatcgaggatgaacggctctccattatacccttgctcacggaaccagttgttctcgcagtgccgaaggaaaaacaaaggtggatgccgccggaaatggtcgcgctgattgagaaagcgctggaagaagatgagggacaccagccgtgtgtgccgcttgacatggtaaggaacgtgccatttattctgttaaaagaaggcttcggctttcgcaggacagttctcgatctctgtgcggaaagcggctttaagccgaatgctgcctttaagacaagccatattgaaaccgcccaatctcttgtggctaacggattaggtgtgacaatggcaccgaatatggtcagaagggataaagatccgggtgtgatctatttattgattcaatccgcgccatcacgaaccctcgtcttcgtctttttaaagaaccgctatgtcagtctgaccgcccaggcctttatggaactaacccgggaaagtcttaaacaaacgtttgatgaaggctgtctgggaaacaaagatgaaaatatttagaaaacaaagccgaaacgtggtagtataggaatacaaactaaatcttataaaacaaaggggaataatcggaaatgcaactattcgatctgccgctcgaccaattgcaaacatataagcctgaaaaaacagcaccgaaagatttttctgagttttggaaattgtctttggaggaacttgcaaaagtcaaagcagaacctgatttacagccggttgactatcctgctgacggagtaaaagtgtaccgtctcacatataaaagcttcgaaaacgcccgcattaccggatggtacgcggtgcctgacaaggaaggcccgcatccggcgatcgtgaaatatcatggctacaatgcaagctatgatggtgagattcatgaaatggtaaactgggcactccatggctacgccgcattcggcatgcttgtccgcggccagcagagcagcgaggatacgagtatttcaccgcacggtcacgctttgggctggatgacgaaaggaattcttgataaagatacatactattaccgcggtgtttatttggacgccgtccgcgcgcttgaggttatcagcagcttcgacgaggttgacgaaacaaggatcggtgtgacaggaggaagccaaggcggaggtttaaccattgccgcagcggcgctgtcagacattccaaaagccgcggttgccgattatccttatttaagcaacttcgaacgggccattgatgtggcgcttgaacagccgtatcttgaaatcaattccttcttcagaagaaatggcagtccggaaacagaagtgcaggcgatgaagacacttgcatatttcgatattatgaatctcgctgaccgagtgaaggtgcctgtcctgatgtcaatcggcctgattgacaaggtcacgccgccgtccaccgtgtttgccgcctacaatcatttggaaacagagaaagagctgaaggtgtaccgctacttcggacatgagtatatccctgcttttcaaacggaaaaacttgctttctttaagcagcatcttaaaggctgataaatgtgaaaagccgccgcatatcatcaggcggtttttttctgcaaactgccggaatgagaacagactggagacgaatagatatgaaacaaagaatcattgatgaattaaaacggatcgagcagtcatacggagtcaaaatcgtgtatgccgtcgagtcaggaagccgcgcatggggatttccctcgcaggatagtgattacgacgtccgctttatttatgtgccgaaaaaggagtggtatttttcaattgagcaggagcgtgatgtcattgaggaaccgattcacgatttgctggatatcagcggctgggagctgagaaaaacgcttcggcttttcaaaaagtcaaaccctccgctcctcgaatggctgtcctcagacattgtgtattacgaagcatttacgaccgcagagcagttaagaaaactgcgcacggaggcatttaagcctgaagcaagcgtgtatcactatatcaatatggcgagaaggaacgtcaaggattatctacaaggacaagaggtcaaaattaaaaagtacttctacgttcttcggcctattttggcctgccaatggattgaaaagcacggaaccataccgccaatggactttactgttttgatgaatgaacttgttgctgaacccgagctgaaggctgaaatggaaaccttgcttgaacggaaaagaagaggagaagagcttgacctcgaagcaagaatcaatgttattcaccaattcattgaaacggaaatcgaaagaatcatggaagcggcaaaagaactgaaggcagagaaaaaagatatgacacctgagttgaaccgtttgcttttgaatacggttgaagaagtgtggaaggatggaggaagctgatgttttttgtcgcttccttttctcctttattcgacagaatcccccccgactttctaactatctgattgtgacaaacccacaaaaataatcagaatctttgtattttgagaatattgtgaacgtcggttttgtccatttacaataaactcatacaaatacttcttagattgcggggtgttgaggttggaagtgatcacaagagattttttcttatttttatccaaaagcggctttctcaataaaatggcgaggaactggggaagccgggtagcagcgggtaaaattatcggcgggaatgactttaacagttcaatcccgactattcgacagcttaacagccaaggcttgtcagttactgtcgatcatttaggcgagtttgtgaacagcgccgaggtcgcacgggagcgtacggaagagtgcattcaaaccattgcgaccatcgcggatcaggagctgaactcacacgtttctttaaaaatgacgtctttaggtttggatatagatatggatttggtgtatgaaaatatgacaaaaatccttcagacggccgagaaacataaaatcatggtcaccattgacatggaggacgaagtcagatgccagaaaacgcttgatattttcaaagatttcagaaagaaatacgagcatgtgagcacagtgctgcaagcctatctgtaccggacggaaaaagacattgacgatttggattctttaaacccgttccttcgccttgtaaaaggagcttataaagaatcagaaaaagtagctttcccggagaaaagcgatgtcgatgaaaattacaaaaaaatcatccgaaagcagctcttaaacggtcactatacagcgattgccacacatgacgacaaaatgatcgactttacaaagcagcttgccaaggaacatggcattgccaatgacaagtttgaatttcagatgctgtacggcatgcggtcgcaaacccagctcagcctcgtaaaagaaggttataacatgagagtctacctgccatacggcgaggattggtacggctactttatgagacgccttgcagaacgtccgtcaaacattgcatttgctttcaaaggaatgacaaagaagtaaaaaaggagagattatcatgacaacaccttacaaacacgagccattcacaaatttccaagatcaaaacaacgtggaagcgtttaaaaaagcgcttgcgacagtaagcgaatatttaggaaaagactatccgcttgtcattaacggcgagagagtggaaacggaagcgaaaatcgtttcaatcaacccggctgataaagaagaagtcgtcggccgagtgtcaaaagcttctcaagagcacgctgagcaagcgattcaagcggctgcaaaagcatttgaagagtggagatacacgtctcctgaagagagagcggctgtcctgttccgcgctgctgccaaagtccgcagaagaaaacatgaattctcagctttgcttgtgaaagaagcaggaaagccttggaacgaggcggatgccgatacggctgaagcgattgacttcatggagtattatgcacgacaaatgatcgaactggcaaaaggcaaaccggtcaacagccgtgaaggcgagaaaaaccaatatgtatacacgccgactggagtgacagtcgttatcccgccttggaacttcttgtttgcgatcatggcaggcacaacagtggcgccgatcgttactggaaacacagtggttctgaaacctgcgagtgctacacctgttattgcagcaaaatttgttgaggtgcttgaagagtccggattgccaaaaggcgtagtcaactttgttccgggaagcggagcggaagtaggcgactatcttgttgaccatccgaaaacaagccttatcacatttacgggatcaagagaagttggtacgagaattttcgaacgcgcggcgaaggttcagccgggccagcagcatttaaagcgtgtcatcgctgaaatgggcggtaaagatacggttgttgttgatgaggatgcggacattgaattagcggctcaatcgatctttacttcagcattcggctttgcgggacaaaaatgctctgcaggttcacgtgcagttgttcatgaaaaagtgtatgatcaagtattaaagcgtgtcattgaaattacggaatcaaaagtaacagctaaacctgacagtgcagatgtttatatgggacctgtcattgaccaaggttcttatgataaaattatgagctatattgagatcggaaaacaggaagggcgtttagtaagtggcggtactggtgatgattcgaaaggatacttcatcaaaccgacgatcttcgctgaccttgatccgaaagcaagactcatgcaggaagaaattttcggacctgtcgttgcattttgtaaagtgtcagactttgatgaagctttagaagtggcaaacaatactgaatatggtttgacaggcgcagtaatcacaaacaaccgcaagcacatcgagcgtgcgaaacaggaattccatgtcggaaacctatacttcaaccgcaactgtacaggtgctatcgtcggctaccatccgtttggcggcttcaaaatgtcgggaacggattcaaaagcaggcgggccggattacttggctctgcatatgcaagcaaaaacaatcagtgaaatgttctaagcgggactaaatgggcatcctccctgcgggggtgtccatttcatccatatactataaaaaagaggaggaagtgccatagaaaacacacagctgattatttcgatttgtatttatatggcgggaatgctgctaatcggctactttgcttacaagcgtacgtcgaatctgacggattatatgctgggaggacgctctttgggtccggcagtaaccgctctcagtgccggcgctgccgatatgagcggctggctgctaatggggcttccgggcgccatgttttctactggtctgagcggcgcttggatcgtcatcggactttgccttggagcgtgggcgaactggctttacgtcgcaccgcggctgagaacctatactgaaaaagcggggaattctattacaattcccggattcctggaaaatcgcttcggagatcaaacaaagcttctcagactgttttcgggaattgtcattttagtctttttcacgttttatgtatcgtccggaatggtgtccggcggcgttttattcaacagcatcttggggatggattatcacactggcctgtggattgtgacgggtgttgttgtggcatataccctgtttggcggctttttggcagtcagctggacagattttgttcaggggatcattatgtttgccgcactcattcttgtgccgatcgttacgtttttccacacgggaggagcaggtgatacagttgctgaaatccgctctgtagatcctgatatgtttaatattttcaaaggaacgagcgtccttggcattatttctttgtttgcctgggggctgggatactttggccagccgcatattattgtgcgttttatggcgataacgtccgtaaaagagatcaaaagagcgcgcagaattgggatgggctggatgattttgtctgcagtaggcgcagtgctgaccggtttgggcggaatcgcttattaccatcagcgcggcatgacactgaaggacccagagacgatttttattcaattagggaatatcttgttccatccgattatcacgggttttctgatttcagcgattttggccgcgattatgagtacaatttcttcccagctgcttgtgacatcaagctctctggtagaagatttgtataagtcgatgttcagacgctcagcttcagataaagaactggtgtttttaggccgactggctgttctggctgtttcaattgtcgcgttggttctggcttgggagaaaaataacaccatccttggattggtcagctacgcgtgggcgggcttcggtgcatcattcgggccggttgtactgctcagtctgttttggaaacgaatgaccaaatggggggcactcgccggcatgattgtgggagcagcgactgtaatcatttgggcgaatgccggtctttcggactttctgtatgaaatgatacctggttttgctgcgagtctattatccgtcttttttgtcagcatattgacgcaggctccgtcacaagctgtcacagaccagttcaacgactaccaagatacaatgtcacaataaagatcgaaaggaggaggaaggggctgtccctttttcctcttttctccttttaagcggccatttttttcttttggaaacaaacgtatttttttctatacaaaaagaccccgtatggatatgattaaagtaaaaaaagtataggagaaaaaggtatggaagagcttttagagagagttttttcattttcagatgttgataagctgattgattttattagctatgaactgcaaaagccagtgatactggaaagcgcggatttctttttgttagcctataattcttactatattaaccattttgattctgccaaccagcagactattttttcgaaaaagtgtccggtccagatttttgagaggtttctgaaggacggaattattgaaaaattgaaaacagagcctgagccttttcgcgtcaataaaattgaaagcattgggttaaaccagagggtggtcgtgagtgcaaagcacaaaggggaagtcatgggctacatctggattcaggagctggaccaaaatctgacggatgaagagctcgactttttgtacgagacctccttccatgtcgggaaaatcatttataaaacgaataaattgaaacaggaaaaggaagaaaaagcagaggatctcatcaaacgggcgatctatcagcaatttacctctgagaaggaactcagacgggaagctgaaaggatcaacaccgtgctgccttccatgttttcagttgttatcctgcacgccgcaaatggggatggggaagcggttgaggatttaaaggaaaatatcaggtcgtacctgaatttacgggataaggtcagtcatgtcttaacgatcgaatcaaacattgtcatcgtcgtagcgagtttttcccaaaaaagctccgtctcctcagcagcttctgagtttattaacaagctgttaacacattttcactttcaaaaaatacctacccctatttatatcggtatcggaaacgaatataatcacctattaaaacttggcaagagctacacagaagcacttgaagtcatcaaagccgcagaaatcaccggcaatcaggaaaacattccatatgaatatgccaaactcggcatttaccgctatttagaaagcatcgaacagaaaaatgaatttttagaatacgagaataaagatttagctttattaaaagcaaaagacgaagaaagcagcactgagctgctcaaaaccttggaaatctatctcctcaacaactgcaaaacaaaaccagcggcagaacagctgtttattcaccaaaatacattgaattaccgcatcaaacagattactgagatgacgtcgatcgatttaagcgatttcagaacgcggtgccagctctatctcgatttgatgctgatgaaaaagaaataaaaaagaaaccagtacttgtactggtttcgtcttcacttaaaatcctctgtaaacatacggatcatcaggttttttaatggtattccagtcagttactttgacgacagggagagttgacttgaatggctggtaatactctgaggccagagtgcccttaatgtgaatccattcatcatccttgatgtccatgtccttcggaaattccacaagcatcccgtacacgccggaatcagcgatacagtgaatgatgccaaaccttaatacgaacagctgatttttgttaattgcgtttcctttgtaagcaaatccatggaattctatcgtccgtccgagaaattcacccggatagttatagatggtttccattccttttaggaaatcgtcatcggtcagagaaatctcttttttgctggaatacttattaaacagctgtttcatttgtttgtcatagctgtcttgcgcgtaataaaggctggcatcaggccgcaaatactgtgtttgggagtaatgatctccgctctccatcgccttaaacgagaacccttttgttttgacaatggatgagtcaagcgttgcaatcgggaagaagatgcctgacaccaaaggaaaaagaaaaacaacataaatcaaataacgctgataaaatggcttgttttgttcatggtcatgctcgtgatcatggccgcacccgcaatcatggtgacccccgcttttttcaggcgacttgataaatagatatgcttggacggcggtcagaatagccagcaggaaaatcgcaataaaggatagataggaatatttcatattgatatattttgttagatttcctgaggcatgcagatgataaaagaaaaacgtaaatcccatcagcaccaataaacgaaacatccaatcacccctttaccagtagtgatcccgctaaaacaatcacgacaatatatgtaatcagcaggaaaacaaatcgttttttgaaggctgcaagcatcatcaatagattcttaatatccaccattgcgccaaagacgagaaaggcgattaacgatcctaatgaaaatgtgctgctgaaggaagacgcgatgaacgcatcaacttctgaacaaagcgacaggacaaacgccagacccatcatcacgagggaagaggatacatcattctgcccgatcgcaagcagagtggatgttttgacatacgtctgcatagcggctgcgataaaggcgccgatgattaaatatttccccacggagaaaaattcatcaatggcatgccgcaaggtcccgcccagtttttggagcaaggtgccgtgatgatggtggtggtgcccgggttcatcaggctttaaaagctggttatctttaaattgataggataaaatgaccccgatgatcagcgaaacggcgagagccagtccgcctctgtaaaagaccacgctccatctattcccgaacgcaatataagtagaaaataaaacgataggattaatgataggcgcggtcagcatgaaagcaacgcccgcatgcagaggaactccctttaacagaagccgcctcgtaatcgggatgatgccgcattcgcaggcgggaaataaaacgccggccagcgcaccgaataaaacggcgagaaaacggtttttcggcatgattcttgcaatcatttcttcagaaacaaacatttgaatgattccggaaagtatgacgccaatcagaataaacggaatggcttctattaaaatgctgataaaaatagaattcagctgaagaaaagatgattgtgctgtcacaataaaacctccgctcatgttaagctgcctttcttatgataccagaaaaaaaggcactgcttgtttgacggaggaagggaaaggatcgtttcactttggttaggattccaaaaaaccgagtaggatactgtctgtttctgcagcttcttttccgagccaaatcaggtgtccccatgagtgaagcaaacagagaacagcgccacgaatgtgctcttttgcatgatgtgcatgtgacaagtcaaccaatccatcataaacactttgcataatcagcacgggacatatgatggcttgcaggtcttttaaagagacagcggcggtttgtgacaagtcaatcagaaatccttcacccgagcgctgccggctgttcattttccgaaatgcttctatgtctttttcattcatcaaggacttgattcgctgaaacggaagcgtgctgaattgggggctcatagctcgaaacatcaaacgcgggaaagcgttattcaaggaagaaatcagcttccatatccacttttctaccggcgggcggaagagaattttccccaatttatattcagtgtcttttggggtgagccactctttggtgactgcggattgcagggtcaatgtatttactcttttcggataatgtgaggcaaagcatatgccgctcggccctcctgctgagatggcgatcacatggacactctcgatttgtagatgatctaataatttcacatagaaacggcaggcattggcaagactttttccaatttcttttgacgtccgtccatagccaggccttgaaggcgtaatgatggaatacccttgctcaatcaacgctgtgtatccgtattcctcgtaacaatttgaatgcccgccatgcatgacaaggatcggagttcccttgcctgtcacagaatattctagtgtactgccatcgaaggtgatcgtttcgactcgtcttttcatctgttactcccatttgttttttgcctattatagggttttcagcaattgaccacaaggtgaagaaatgaataaacacaagctcgtgaaatatgatatactttgtattgatattcattctcaattaaaatgatttgatatagatgtgaacgggaggcaggacggatggctgagaatcaagaggtatatgacgttacgataataggcggggggccgatcgggctgtttactgctttttactgcgggatgcgggagctgaaaacaaaggtaatcgaatttttgccgaagctcggagggaaggtgtctttattctttcctgagaaaatcattcgcgatatcggcggcataccggggattgcgggaaagcagctgatcgagcagctgaaggagcaggcggcaacgtttgatcctgatatcgtattgaatcagcgtgtgaccgggtttgaacgcctagatgacggcaccattgttctgacgggttctgaaggggagaagcactatacaagaactgtgattttggcttgcggcatgggtacacttgaggtcaatgagtttgacagcgaggatgcggccagatatgcgggcaaaaatcttcattatggagtggagaagctcgatgcgtttaaagataagcgcgtggtgatatcaggcggcggagatactgcggtcgattgggctaatgagcttgaaccgattgcggcgtctgtgactgtcgttcatcggcgtgaggaattcggcggaatggaaagcagcgtgacgaaaatgaagcaatcatcggtgcgggtgcttacgccttatcggctggagcagttgaacggagatgaagagggcatcaaaagcgtgaccgtttgtcatactgagtctggccagaggaaagacatagaaattgatgagctgatcattaatcatgggttcaaaattgatctcgggccgatgatggagtgggggctggagattgaagaaggaagggtgaaagctgacagacatatgcgaacgaatcttccgggcgtgtttgtggcgggcgacgcggctttttatgaaagcaagctgagattgattgccggcggatttacggaaggcccgacagcggtcaacagtgccaaggcttatctggaccctaaggccgagaatatggcgatgtattccacccatcataaaaaattggtgcataaataaaacagcccttgggggaaagggctgccagccatcagctgtgaaggagctttttctgcgtctgttgattctgaatgaaagctagcaattcatcctgttcttgtacagctgtgaatccataagcttcggcagctgagtcatcgcctatacagacgatagggggccggcttgctgacaattccggcgaaatgccaatttgttcgccaccattgatcaattgctgaacggacagcttgttcgggcaaatgaccatgtgcagcggggattcactgatggtacgctgaatcatgtgggtgaaccggtcatctatgacgttttcatgagtgatataaaacgaacaggattcatgcttttgcatgttttccactgcatggcggctcccgacaacaagacgtttctctgaatcaggctgaatggcggtgacaagaaagccccgtttctcaagctctgtctttgcttgctcagatgctgcactcagtttggctgtcagctggcggatgtcgattttctgagaagccagtgctctgaaaaattcacaaaccgcccggcgcgatgtgaaaaaaacgtcttcaaaggtgccaatctttcgaagaatttcttcattgacaggcatgttttcggtccgccatttcggccactcgatgagatcggcgccggaatcgcgcagcttgtctgcaagcgggtcttcatcttcgccatgagtcacaaccatcaaatgccgtccgatgagcggtttgctttcaaaccagctgtgtgtttgaaagttgacgatgtctccgatgacgataatcgcagggtttgtaatctggtgttcctgcactttttgctgaatgttctcaagtgttcctttcacactccgctggcggccccacgttccccattggatgacaatgacagggacagaaggcgatttcccgtatgaaataagctgctggcaaatataagacaagttcttgacacccatgtaaaaaacaagggtttgaacgcttcgggccagcccttcccagtcaaggttcggcgtgccttttaatgatttatcatgcgctgtaatcatggcaaaagacgatgcaaaatcccgatgcgtgacggggatgcccgcatatagcggcgctgcaattccagaggtgattcccggcaccatttcatagcgaatgccgtgctcatgaagagcatctgcttcctcgccgactctgccgaatacgctcggatctccgcccttcaagcgaacgacggttaacccatttaatgctttttcaaccagcagggcgttaatttctttttgtttcataaaatggcggtttggcagttttccgcaataaataaactggcagtccggtgatgcaaattcgagcagcttcgggttggcgagccggtcatataaaatcacatctgcttccttgagcgcctgttttcctttgatggtgagcaggcctgggtcgccgggtccggctcccacgaaatatacgattccgttcttcatgatcatgtcatccttccgtcactgtaaaaaatgaaggaccactagaaaagtgatccggtcttttgatcaatatacgagataaacatgttctccttcgatcagcgtttcatatgttttgacgcatccgtggtcaggttcttggacgattccgtcttctaaggaaattttccagtcgtgcatcgggcagaaaacatattgaccgctgacgatgccttctgccaggacgccgcccttatgcggacagcggttttcaatggcgcggatgcttccgtctgaaagcttgaaaaccgcgagctccttatcttcaatatacactgttttgcctaattgttcaggcaattcttcaatttttccgatacatacttttgttacgtctttgtttaccatgtccattcctcctcaatgatagtttttgtcattatgatgtggtcacgacattttcaaataattctttagaggtttgtttatcctctaaaaagtctttccacggatccttgtggacagagagtgtttcattcattcggccgttcagctcctgccgcttttccggatcgtttaacacggattggacatgggataaaccgacgcgctcaagccatgcggacgtacgctccagatagtttgcggtttccctgtaatattgcaggtaagcgcctgcgtattctaagacttcttcatttgttttcaccttcatcagcaaatcgccggcacgcaagtgggttccgccgtttccgccgacataaagctcccagcctccgtcgatgccgacaacgccaaggtccttaatgccggattccgcacagtttcgcgggcatgcagacacggccattttgactttgtgcggcgtgtttagcccttcgaattttttctcaagcgcaatgcccagtgccatggagtcttgtgtgccgaagcggcagaattgctcgcctacacatgttttcactgtgcggagcgtttttccgtatgcgtagcccgacggcatatcaagatcttcccataccttcggaaggtcttcttttttcacgccgataagatcaattcgctggccgcctgtcattttcacgagtgggatctcatatttgtcaacgacatcggcgatcttgcgcaaatctgtggagttggtcacgccgccgtacatccgaggaacgactgagtatgttccgtctttttgaatattggcgtgcattcgttcattaacaaagcgggatgtccggtcatcctcgtatttggttggattgatcatgcctaagtagtagttcagagccggccggcatttggaacagccttctggcgttttccagccgagcacattcatgacttctcttgtatgtgacagccctttggctttgatttcttctacgacttcatctcttgacaatgtggtgcagccgcaaatggcttctttttgcgctgacgcatcaaagtctgatccgagcgtatgctggaggatttcttctacgagtggcttacagcctccgcatgagcgggatgcgccagtgcatgctttgatctcgtccgttgacgagcagcccttttcctgtatggcttgaataatcgcaccttttgacacgccgttacagccgcagatgatttcatcgtcgctcatcgctgcggtgatgcttgtgcctgcttcttggttgagaggctgtaagattgatattttagaggtttcagagatatcggcttctttttgaatcatagaaaacaggcgattgccttcgctgctgtcaccgaataaaacagcaccgacaattttgttgtctctcaggacaatttttttatagatgccgtcctgctcatcgaagactttaatcgcttttttgtcctctgattcatcaaagtccccggcagagaaaacctcgacgcccgatacctttaactgtgtggagagaacggagccctcatacgggtttgtttcgatgccgcaaatatgcttcgccagcacttttgcctgttcatagagcggcgccacaagcccgtaggcgattcctcggtgctcggcacattcgccgaccgcgtaaatgtgcgggatttcagtctgcatataatcattgacgatgatgccgcggttaaccggaatgccgctctcggccccgagcgttgtatttgggcggatgccgacagccatgacgactaaatcagcttcaatgcttgtgccatccttgaatcggaggccttcgacacggtcgtcaccgacaatttcttctgtttgcttttcaagtaaaaaggtcataccttgtttttctaactcgttttgcagcaggcgtcctgccgttgcatcaagctggcgctccatcaggaatggggcaaggtggatgacggacacatccatgccaagattcagcagtccgcgagctgcttccaaaccaagaagtcctccgccgatgacggcagcttttttatattgttttgacgcggcgagcattgtgtctgtatcttttatgtcccggaaagctgtgacgccttttttgtctgcgcccggaatcggaaggataaaagggaccgagcctgtcgccaggatcaattcatcgtaaggctggattctgtctgcatctgtgatgactgttttgttttccgtgtccactttgatgactgtttcatttgtatacaattgaatgttgttttcttcgtaccagtcccaatcgtttaacgtaatatctttaatatctgtatcgccttgaagcacttttgacaaaaggattcggttgtaattgggatgcggttcggcaccgaaaattgtgatctgaaactcgtctttagcaatactcagtatctcttcaatggcccttaccccggccattccattaccaacaagaactagctgtttttttcccatcagatgatccgctccttatcaatgttttttccagcgtagcacagcaaaaaggaatatttaagatacatgttataaaatgtaacaaaatatacgaaaagttctaaaaattttatgaaaaatttaaataggtctgattcggacggcgcataccttaaaaccgggcattttacaggctggatctaaggcttccccgattaaatcattcacattttgagcgtctgcccaatggatgggaacaaaaacagtatcttttctgatttgttctgataatttgctgcggacggtgatgcttccccgcggcgattctatttttaccagtacacggtcctcgatattgtaggtcgctgctgtttgcggatggatttccataaacgattcaaaatgtctcgcggcaagggcggcgctttttcttgtttggacgcctgttaagtagtgagacatgactctgcctgtcgttaaataaagcggataatcggctgtcggcttctcttttggaacaggtggttcgtttggaatcacacttaatgccgctttttgatccggatgagcaaatgattctgtaaacaagcgcccagttccgggatgatcagattccggacacggccaatgaatgccgccttcacgtctgagcctgccgtatgagatgcctgaataatcggcaatcccgcctcggctcgcttctctcaattcattaaaaatatcctccgctgacgtataagaaaagtagcggcccttgccgagagcggatgcgagatcacaaatgatctgccaatcatgctttgcttcgccggggcatggccggcttgcttctcttaatgtcacgcgtccttctacatttgtcatggtgccttcatcttctaagtaagaggaggcaggtaaaatcacatctgcgtatttcgcagtctcagaaataaacaaatcgattgcaacaaagaatgtcagtttccttaaagcctttttcacgagattcgcatttgggctggagacagcaggattggagcacatgaggaacaatcctttgatgtcgccgtcgttgattttttccatcatttcataggctgagacaccttttcgcggcagatcatcctgatggattccccacactttcgcaacatgtgcccggtgttgttcgttttcaatagatcgatagcccggaagctgatcggctttttggccatgctctcttgcaccttgcccgttgccttgtccggtgatcgccccgtaacctgagtaaggcttgccgatttttcctgtgatcagcaccatgtttaagaagcctttcacagccgctgttccatcggtttgctgttcaatcccgcgggctgtaaacagcatgccggacgtttccttggcaaactttacagccgcttttcttatatccaccagggggacactcgtctgttcggcgatgtcattcaggtccaacgagtcagtatgctgcttcagctcttcgaatccatttgttcgtgattgaatgaaatcctcgtttataagctgttcgtcgatgatgattttgacgagaccgttggcaagggcggcgtctgtgccgggtttgattttcaaatgaagatcggcgatttttgttgtcgctgtttcacgcggatcaatggcaatgatgtaagctccgttttctttcgctttttcaaaatatggcataatcgtaggctggcactccgcgatattggtgccggccagaatgatcacacgggtgtggggaatgtctgataagggattcgttaagcctctgtccgcgccgaatgtttggttggctgcggttgctgcggcggacatacaaagcctcccgttgtagtcgatgtattttgtctgtaagcccacccgtgcgaatttccctaacaaatacgcctcttcatttgtaatcgaggcgcttccgtataccgccatagcgtcatggccgtgttctgcttgtatcattgtcacttggtctttaatgtaattcagtgcttcttcccaggaaacaggcataaactcgccgtttttcttcagcagcggccgggtgatgcgggaggagttcagggcatgctggtgggcgttcatgcccttcatgcatagccgaccctgtgttgtaggattatcaatcccgatcgcagtgtactttttgcgcgtgacgatggtttgttccacgagctgcattttgcactgcatgctgcaaaacgggcattgagtgtcatatgttttttctgattggacgtcttgctgtttatcacggaaatatctaagcagtcgttcagtcaaaatgcctcatcctttcttatatgcacccgtctctacagtcgggttttgaatcagtgacagatctgtttggaggctttccagcagctgtgcccttaggtcttcttcgaatagcacttctctgatatgaacgatcccgagacggtctatccactgatgaacaccttctaagtaatgagccgtttcccgataatactggatcagtcctttgatcatgccggcagtgctgtcttcgttctcagtcacgcaaaacaaagctcctgaacgggcatgagttccccggacgccgccgatgtgaatgtcccagccagcttgtctccgaattgcgccgacatcttgcagggcggcatcggtgcagtctgtttcacatgataagctgatagaaatgggagcgggtaagggaagcgtctcaagttgtctttcgatttgggctgccagctgctgaatcgatcgattttgcccgcatgtacatgctttgatgctttgcagcgtgtgtcggtgttcattggtgtaaacgggcattttcagatcttttttcatgttcgggagatccgcaggcttgatcccggaaagcttcagcctttggccgtgagtgatggatacgtcgggaatgctgtatgcctcaatgatgttggcgatggttcttagctgctccgcgtttgtccgcccgccgtacatttgcgggatcaggatgcatgtctcttcagtggctggctcaggctggacaaacccagggtacagcatttccagatagtattgaatcgcaggaacacaagtactgcatccgttttttgttttccagccaagctggttcatcacttctgccggattagtgaatggcctgcgctgaagctcagcgatgatgtcgtcttctgtaaaatcagtacagctgcaaaacgaaggtgtgccggcgggcttcgtatattcgctgttggtcatgtatctcaaaaggtcttcaacgagcggtttgcatcctccgcaggacccagtggctttggtgcagtgcttgacttcctcaacagttgttaagcttttcgtgtacaccgcgtcttcaatcgcgcctttcgtcactgtgttgcattggcaaatcgtttcactggaaggcatggattcaaataaagggccgcttgtctccggttcgatgatctgctttttgacaatggagatgtctcgttgtttaagcaggctgtcgagaagccgctgcttgtcatgggtgtctccgaataaaataacgccggccagtttgtcatctacaaaaagtgcttttttataaacgcctgcttgttcgtcgtagattttgatgctcgtcgtgcgttcatcctcttggatctttcctgctgaccacacatcgattccagctatttttaacgccgaagatggtgctgagccttgatattcctcacatggaacgccgcaaatatgactggcgagaacttttccctgctcataaagcggagccaccaatccgtacaccgttccgttatgctcagcgcattcaccaacggcgtagatattcggttcgcttgtctgcatgaagtcattcacgatgatcccgcggttcactttgattccagcagatacagccaattcaatattcggtttgacgccggccgccatcacaatcaagtctgcttttaatgaagagccatctttaaaatggattcggtctgccttcgtggcgccggaaatggagacggtgtctttctccaaaagaaaggttaggcctttttgttccagctctgtttgcagcagccgcgccgctgtttgatcgagctgtttttgcataatgccggcggagtggtgaatgacgctgacattcataccgagatgctgtaaaccgactgcagcttccagtcctaataagccggctccgattaccgcagccttttgaaagtgctgggccatcttcatcagtgcttggcagtcttctattgtccgaaatccatagacaccttttttgtctgccccggggatagggagaatatgaggggaggagcctgttgccactattaatttgtcatacgacagagtgcgtttccgatctgtgatgacctgctgctgatctgtatcaatttgaataaccttttcgcctgtgtaaagcgtgatcccgttcttgtcgtaccaatccttgctgttcagtgtaatgtcatcgagtgacgcttcaccctgcaatacagaggataagagaatgcgattgtaattgggatgcggctcgcttccgaaaatgacaatctcaaacatgtggcgattcagctttaatacttcttcaatacagcggattccggccatgccgtttcccgctaacaccaatctttgtttcttcatgtattagacctcctttggcgaagctcgtaagttttctcctattaaaaattatgtcacaatgcactgttaacgcattaaacgtgtcacaaaaacttacacatgtcttttccagaaaataatggtcctatatccttgattcagaaaatgtaaaataatgagggtctagaaaggggaatcttatgaagctgtcggaactgaaaactagcggtcatccactcactttgctctgttcctttttatactttgatgtcagttttatgatatgggttatgcttggggcgctgggtgtttatatttctcaggattttggcctgtctccttttgagaaagggcttgtcgtagctgtgccgattttatctggatcagtgtttcgtatcattcttggtattttaacggatagaatcggaccgaaaaaaacggcagtgatcgggatgctggtgacgatgattccgctgctttgggggacattcggcggccgttccctgactgagctgtatgccatcgggattctgcttggcgtggcgggggcaagttttgctgtagcgctgcctatggccagccgctggtatccgcctcatttgcagggacttgcgatggggattgccggagcggggaacagcggcacgttgtttgcaaccctgtttggccctcgtctggcagagcagttcggctggcacattgtcatgggaattgcgctaattccattattgatcgtctttattctttttgtatccatggcaaaggattctcctgcacagccggctccgcagccgctcaaaagctatctgcatgtgttcgggcaaaaggaaacatggtttttctgcctgctgtacagcgtcacatttggcggatttgtcgggctctcaagctttttatctattttctttgttgatcaataccagctatcaaaaattcacgcaggggacttcgttacattatgtgtggcggcggggagctttttccggcctgtcgggggcttgatttcggatcgtgtcggcggtacgaaagttctttctgtattgtttgtcatcgtggcactgtgtatggccggagtcagcagcctgccatctctctcaatggtcattgttctattgtttgtcggaatgatggggctcggaatgggtaacggtgcagtattccagctcgtgccgcagcgttttcgcaaagaaattggcatggtgacgggaatcgtcggtgcggccggaggaatcggagggtttttcctgccgaacatcttaggatctctcaaacagatgacaggcacatatgctatcggttttatcacgttttcctgtatcgcgctgctggcgtttgcacttgtgcttgccgcaggctattactggcggaaaagctggagcgcggaaagcagcccggcggatgtttaggattttgacggacacgcgtttgtgcgtgtcttttttattttctcttgattttcaacagtgaaccgatcaaaataaatagtaattattacgatttgttagtgagaggagttttctgaatgaatcaacatacgctgctcccgaaaaaaacggagcgtcttcaatactttggatcggtcagtccggtcaaaggcgagaaaccagtggaaaaagagaaaatgaaggacctgcaaaatatcaggaaggattatttttttgacattcagcatgtaggtgtcgctaatgtgtcccatccagtcacaatcacttctgccatgatgcctgccgagcaaacaacggctgcgaactttacaatgacttgtaatttgccgagaaatcagaaggggattaacatgagccggttaacagagctgctgcaagtctatcatcaaaatggctggattctctcattttcctctcttcagcaatttacgaaagagcttgcagaaaacatggacacatcatctgccacagttgaagtgaggtttccgtggtttttcgaacggaaaagcccgaagcttgagaaagcgggtttgatgcatgctgatatattcatgtctgtcacctatcacaaagatcagccgtttaaacagcgtgccggcatctcagcaaaagtaacgactctgtgcccttgctccaaggaaatcagcgaatacagtgcccataatcagaggggaacggtcagcatttgggcggatattcacccggccgcatcgctgccaagcgatgttaaagctgatttgcttcacgccgcagaatcaaatgcttctgcgagactgcatccggtattgaagcggcctgatgaaaaagccgtgacagaaacggcctatgaaaacccgagatttgttgaggatctcgtccggctgattgctgctgatttgtttgagcttgaatgggtgtcggcctttgagattgaatgccgcaatgaagaatcgatccatctccacgatgcctgcgcgaagctgcgtttttcgaaggaagtggataaaatatgaaactctcattattcattattgcagttcttatgccagtcagcctgctgtcagcctgctccgatcatgcagaagaacacgcaagtatcaatacaaagaaaacggtcgaaaacataacggacgttcgaaaaacagcaaaaacaagcattgattggacaaagccttcgggcggagaatacccggatattaaacagaagcatgtctggattgatgtgaatgtgaaggagcagaaggcttacatcaaggaaggaagcaacaccatctatacaatgatgatctcttctggtcttgatcaaacaaaagatgatgctacgccaaagggcaccttttatgtagagcctgaacggggagaatggtttttctccgaaggataccaggaaggcgcagaatactgggtatcatggaaaaatcacggtgaatttttatttcatagtgtgccaatgactaaggatcaaaaagtcatcaaaacggaagcagaaaaactaggaacgaaagcatctcacggatgtatcaggctgaccattccagatgcgaaatgggtatatgaaaatatccctgaacatacaaaagtggtgatcagctgaattgaaaaccgttgacaaaaaggaaaaaagaccatacaatttaaatcgtaacaattgcgttttatgataaatggcttatcattggctgtatctgtgaaaagcggaaaggctaaggatcttgctgtcattgatccccatgaagcgtctcttgaaaactggaaacgaaacccaagctactttctgatgagatatttgcgctttccatcggttcagcaacgcaagtggagcgattgctttatgcaagctgcggttttccgaatgtcggcaaggatttgcgatggggaaaaggattaaacgcggttgaagcctttactgatttagaaaccgggtggcagcgagaaatgagcgcgaaaagctgctctacactattgtacatatggcgaagtatacaatttaaatcgtaatcattctattttaatggaggcattattatgaaaaaaattccggttaccgtactgagcggttatctaggtgcgggaaaaacaacattgctgaacagcattctgcaaaatcgcgaaggcttgaaaatagcggttatcgtaaacgatatgagcgaggtgaacattgacgcgggcttggttaagcaggaagggggcctttccagaacagatgaaaagcttgtggaaatgtcaaacggctgcatttgctgcacgcttcgcgaagacttattaattgaagttgagaagctggcaaaagacggacggtttgattatatcgtcatcgaatcgacaggaatcagcgaaccgatcccggtggcccagactttctcttatatcgatgaagagatgggaatcgatcttacaaaattctgtcagctggatacgatggtgacagtggttgatgccaaccgtttttggcatgattatcagtcaggcgaaagccttctggaccgcaaagaggcattgggggaagaggatgaaagagaaatcgccgacctcttgatcgatcaaattgagttttgcgatgtactgatcttaaataaatgtgatttggtcagcgagcaagagctcgaacagcttgaaaacgttcttcgtaaactgcagccaagagccaggttcattcgttccgtcaaaggaaatgtaaaaccgcaggagattttgcatacagggttatttaacttcgaggaagcgagcggatcggccggctggattcaagagctgacggcaggccatgcggaacacaccccggaaacagaagaatacggtatctcttcatttgtatataagagacgtttgccgtttcattctacacgattttaccgttggttggatcaaatgccaaagaacgtggtacgtgccaaaggaatcgtctggtgcgcatctcataacaaccttgctttgctgatgtcgcaagcaggtccgtcggttacgattaagcctgtatcttattgggtggcggcgctgccgaagcttgagcaggagcaagtcaaacagcaggagccggaaatcctggaggagtgggacccggagttcggcgaccgcctaacgcagctagtttttatcggaactgacctggatgaagaaacgatcacgaaagagcttgatcaatgcctgctgactgaatatgaatttgattccgactggtcgctgtttgaggacccgtttaaatggaagctgaatcaatagaaaaaaagccgtcccctggggagcggctttttttaatgaaacgtttgtttaaacataatgagcgtattttttctcaaggatattctgaaagaccgcggcaatggagcagatggcccaataaatgagagcggtcagaatatacatggtcatataatcaaactctctgcccccgatgattttcgcatgctggagcaattccggcactgtaatcatcgcagcgagagatgatgccttgattaagtcgagcaatacattggcaagcggaggcagcgcaatacgtatcgattgcggcaaaatgatgcccctcatcgtctgccaataggaaagacccagcgaggatgcggcttcccactgtcctttttcgacggatgaaatggctgaacggttaatttccgcaatgtaggcggcgctgtttaggctaaagccgattaaagcagccgtgacagcggaaaattcaatgccgatataaggaaacccgaaataaaggataaacaaaatcaccaaaatcggaacgccccgcataaatgagatatagagcttcgccggccatcttaacaaagcaagcttagacattctggcgagtgatatgaacaggccgatcacagttcccgcaaacatgcttacaaaagagataagcagtgtatacccaatgccttttatgacataagggaacgattcaatagccagcttcgtgttgaaaatatattcccattgaatgctattgatcatggcgtccgattacaaatcaacgtcctgaacgtcggcatcaattttttttgatacatctgctttattgaagaattgtttcgacagtttagtcaaagagccatccttgctcatctctttcaatgcttcgttcatctttttctgaagtgccgcattgctttttttcatgacaagggcctgtttgttcggcatgtacttgatgtcaggatgaattgttatgttgagatccgggaatgccgcgagcgcaagtgtctgcaggtaatagtcgtttaaaatgacgtcagtgcgtccgttggcaacatcttttaaatattgctcattcgtcgcattatcataaatcacttctttggcgccgtattttctcgcgacctccatgtagacggttgtagccgcgccagccgctttcttcccttttaaatccttgagcgttttaatccctgataaattgtcttttcggacaattgccgtgccgtatgaatatttataaggagtagaaaatgcgaacttcttctcgcggtccttcgtcacatcgatgtcattcgcggctgcgtcaacctgtccgctgtttaccgctgtcagcatcccgtcaatgcccatctccttgaactcaaccttcaatcccaggcgttttgccgcttcacgaacgacttcaacctcgtagcccgtcagcttatcagagccagagtcagtatcgtgataagaagtgggataaagcgtgcctgatgtagcgactacgattttccctttatccttaatctgctcccagcctgtatccttggaatcggcttcatttttgccggaacaggctgccaatataagaaagaaagccattgtgaaactgaatataacggctttggaatgcatgaatgatttcacctatagttcccccaatctgttaatcaactaaaaagatagcattgaacataaggggttgcaatatgttgatcgcgttttcaaaaagttcgaattgtgtatacaaaaggcatgggtgggtgattaaaagcggctatgaagggaattggtgatgaacaaaggagttgtccaaggatgaatgcccgacgtaccaaggaaacacatgtggacgtgaaggatgcagtagatccgttattcctctatgccaataccgtaagaaatggtcagaagcatgaaatcgatcttcagaataaatttaagtcttgctgatgcccctaagacatatgatatatccgatgagaaagaaaatggaaacatttaaaccataatggggagtcaaatgaatatttacaaaccagccggattttggatcagacttggagctgcattgttagactatattatagtctccgtgccgcttttgctgatctattggctgattacaggaaaagacccaaacgacagcatgttcatcagtttggttgttctgctgtattctattttgctgccggtgttttggcgcggttatcttatcggaaaaaggatctgcggaatcagaatcgtaaaaaaagacggatcacaggtcagtctgttaacaatgtttttacgggttattgtagccggcctggtttacgttataaccttcggactcggcttgatcgccagcctgattctgattgccgtacgagaagacaaacggaccctgcatgatttaatcgcgggaacatcacttatgcgaccaggtgaagaagaacttaatgctgacgaagagattagaaagagcgaataatggttcgctctttttatttttatgcataaaaaatacaaggcagcaaaacatatgaaaaataggattggaggaataaactggatgaaacgaataaccatcaacattatcacaatgttcattgcagcggctgtcatttctctgaccggtacagctgaggccgctgaaaaacagcagcagtctcccgcaaatgttacactgacagatcagcaaaagaaagagattgaacaactggaagcagagattcttaaaaagcgcaaagacgtgatctcaaagtatgtacaatacggtatcctgcctaaagaaagaggagaacacatcaaaaatcacttggacaaacactttgaaatgatgaaacaaaacggctttgttccaaagcaccatcctcatccgcataaatttgaaaaaagacattaaaatggaaagcatccaatgggaattgggtgcttttttattgttaaaagttactgaatgaattttccggaaaaatatatcgcttttgttgattatatcttataataagatataaatggggtgtataatgatggaaatggatttaatctctaaacttaatcagcagtggacagatatttattatttattacattatcaacataaagataatatttctcaccaggcaatacggattatgcagcatattgaaaagcaaggtgaggcaacaataggagctttggctgaatacttgtctgtctctcacaatacggcgtcagagcatactaaacgtttgattcaaaggggatttatagctaaacggcgaagtcaacaggatgaacgaaaagttttagttttcttaacacaagaaggaagatctgttcttgaacagcatacacagctagataaagagaaattaaaagaaataattgaacgaatgagcacattagaaaaagaattacttgaacaggcatttgaacttttaagtagggaagctaaacaatggcagttttaagtaaagtgatcatctctgcgttgattatcggttttgttactgaaatatcaaaaagacatccgacctatggcggcatcattgctgctttgcccttggtcagtttattaagccttttttggatgcaaatacaaggtgaaaaaatagctcaattaagtcaatttgcatctggtgtgcttacaggaatcccagctacagtttgtttactagctattttggcttttttgctgaaaattcatgtgccgttttggtttgcattatgtgttggaatactaggatgggctatgtttttatggatgcagaagatctttctcaatatattatttaactgagtatagaaaggagatgctatgtttttaaaaaaggttactcttcttcgagataagattttggactttgacagatttccttttactatcccggctataagtcaattaaatgacatcttatttactagccaagtgactttttttgtgggggaaaatggatctggaaaatctactttgcttgaagcgatagcagataagtgtgaattcaatacagcgggcggaagccgaaataatgtctatgaattacgggagtcagattcccatttaggagattacatacgtttatcttggcttccaaaggtaacaaatggcttcttcttaagggctgaatcgttttatcatctttctcttcatctggatgagatggaactagatgctcctcagccataccgttcctatggagggagaccgctacacaatcaatcacatggagagtcctttatgtctctattccgtcatcgttttaaagagaaagcgatttaccttttagatgagccagaagcagcactttctccagctagacaattagcttttttgagagttatacatgatttggtgaagggcggaaatgtacagattatcattgcgactcactccccaatcctactgggctatcccaatgctaatattttaagctttgatggtggaagaatacatcatattgaatatgagaatacagagcatgttcaattaacacgatattttcttggacaaagagaaaaaatattagctgagctgttccgcgactaacatcgagttgatctgaaacgcgtttcatagcctatgataggtttatcaaataattcaggagtgataaacactatgatccaccagcatccagaatcttttccgaaacattttttgtggggctctgcttctgcagcgtaccagattgaaggcgcttggaatgaagatggcaaaggcccttctgtttgggatgtgtttacgaaaataccgggcaaaacgtttaaaggaaccaatggcgagattgcggttgaccattatcaccgatttaaagaagatgtcgctctgatggctgagatggggttaaaagcatatcgattttccgtcagctggccacgggtttttccaaaaggaaaaggagagatcaatgaagcaggtctagcgttttacgatagtctgattgatgaattgctttctcatcacatcgagccggttctgactttatatcactgggatttgcctcaagcgcttatggacgaatacggcgggtttgaatccagaaacatcatagaggattttaatcactactgtattactctttataaacgttttgaagacagggtgaaatattgggttacgttaaacgaacagaactacaattttaatcacggatttattacagccatgcatccgcctggagtgaaagacagaaaacgattttacgaagcaaaccatattgcgtttctggctaatgcaaaagccatcgaatcatttagagaatatgtgcctgaaggcaaaataggtcctagctttgcttattctccggcttaccctttatcaagccatccagaggatatactggcatttgaaaacgccgaagaatttatgaacaattggtggcttgacatgtattgctggggaacctacccgcaaattccattccgctacttggaaaaacagggatgggcgccgacaatcgaagcaggagatatggagctgcttgccaaagggaagcctgattttgtaggtgtcaattattatcagacgatcacctatgaacgaaatccgcttgatggtgtgtctgaagggaaaatgaatacgacaggccaaaaaggaaccaatcaggagacggggatacccggggtgttcaaaacgaaaaaaaatccgcatctgacaacgagcaactgggattggacaattgacccaattgggctgcgtatcggtcttcgccgaattacaagccgctatcagcttccagtgtttataacagagaacggtttgggtgaatttgataaagttgaggacggcactgtacaggatgattatcgaattgattatttgcgttcgcatcttgagcaatgcagacaagccatcagtgacggtgtcgatttaatcggctattgcagctggtcgtttactgatctgttaagctggctgaacggctaccaaaaaagatacggatttgtatatgtcaatcgtgatgaagaaagcacatacgatttaaaacgcttgaagaaaaaaagcttttattggtatcaagatgtcatcaagacgaacggagaaagtttataaagagtccctgagagttattctctcaggggtttttcattacacagaaacagcatcaataatataagtgtcggcgtgcaaatctgacatttcagccggcacagtccagcatgtcaattgatagtctcctttaggcagatcaaaggacagtcttttagacatgatgctttcaatatgaattccgttttctgtgacatgaaaaggaacagtcacttttttttcgtaggagcttactgtttctgaactgttcaggcgcaaaagaataaaggcctttgtatttcgctgtgcctcaaaggaaatggctccgtctgccgcagcatatcctttttcaatcgcttcgtcagtccaatccattacaggaggtgtagaatccttttgaaatacagtaaattgatgatatgaaatcgaaagttcttgcggcttccatgatttgatcaatgtgctgttcctcctctatgtactgtttactgaattgtgaataaaacctttgtgccgtctgggtaatcggtaagctgatgcccgacccaagagcctgctccgcggttgtcagcgggagaaatgtattctacagaagctccctcaccgccttctttgcacatggccattggccattcatctctgtcatacccctttttggaaggtacgtcctttaatgattgctcgcggcgttcctcagctccgtctctgtcaatagtgcacacctctgagtgcccctcatttatcgcatccttaatatgcttggcagtttcgggataacggtcagaaggaaaggtgattgtttcatcatattctttcgtttgagacgttttttgatcagctgagaaaaagtctccttttatcaggccgacagctgcagctgctatgatgacgatgacgagaagtatcgtttttatgatgtccgtcgtgatgttcacctcccgcttttaaaactgacacaagagtaatccagaaagcatttggtgtaaaggtttaaattttatgttttacgatcagtttattgcagaaatcgtaattttagcagatcgaaatatttgttttcagcaaaatacgattgccaatttacaataatgatagtaagtcatcagccgttttcggcttgattaatcattttaaattggcttatgataccggtaagctcctcagctaattgagaaagtgtttcagaagctgcggtaatctcctccattgcagcaaattgctcctctgttaatgcagccgcttgccgggtatttttagtagattctttaatgtcggccgtattggctgcaaaggaatcatttatttgatgtgcactggctgaaatgtttgttacagatgctgataaatcactaatctcggcgctgatttcacctgttgcagctgcaatttccttaaatgcatctctggtgcgctggatcatggtgactccttctgcagcttctgttttcacatgctcaacagatcttgcagaccggttcatatccttttgtatttctatgatcagttttgaaatctgccccgcagactgttgagactcttctgctaatttccgtacttcatcagcaacaacagcaaagccttttccttgttcaccggctctggcagcttcaatcgctgcattcagcgcaagcaggtttgtctgatcagcaatttgggtgatgaccgataaaatttgctcaatttgtttagagcggccgtctaactggtgtatgatttctccgcttttctgaattgactggtgaatcgcatccatttgcgcctgtacatttgcaatttccttttgtccaatgtctgcttttgattgagcgagctgccctttgtcagcgatagcggcagtatttgcagaaatatcccggatgtctgctgaagcttgttttaatgagctttcactattttcaattcgggtgatctgatcttgggctccatttgcaatctgctgtacagcttctgtgattttttctgaagcttgatttgtttcctctgctccggctgagagctgctgagaggctgacgcaagctgaagggctgattgttgtacggtttgtatggtatcgttcagcttcattctcatcttattataatagacgcttagttctgaaagctcgtcaccggttttgtctgacacctctattgtcatatctccgtttccggcactttcaaaggcgctttttaaagcgttcagccgcttgttgatttttctggtgaaaaccaaaacaaggatgactgatactataatgacgataacaagaacgatagcgaattgagtgaaaagtgattgtgtaagtgatgctaaaatactttgattagctccggtatacagcatgccgatgatgttgccattttgatcttttaacggcatgtatgcagtctgataagaagaacctgctacatctgcttgtccgtaaaaacgctttcctttctttaaaacagcggcaataacttcagaagaagcctgggtgccgacagctctttcgccattcttcatgacattggttgcaacacgagtatcgccttggaaaatggtaatggtatcacctgtcttttcaccaagcagatcaacaatatcttcatttccattgatttgtgtttgccctttatagagcttattgtttttcacctgccagtcgcctgacatgacatcatcaatataagtgctgcttaaagcgagatcacctttcgctttttcagttgccatttgtttcatgttttctgtaatttccttaagcatcacagtgccaactgatgccgaaaacaaaagaatcaccacgaaaacgaggcaaagaattttagttcctagcttcatcttaaatcgttttatcaacataattcctccctttacgatttgcaggtcatattacttatcgggtttttgggtttaaagttttattttagaaaaaataaaaccgacctgatcttcaggccggttgtgtgatgctattcaaggtttgcgtggtgagtgaacatagtttcagaatcgagtccttttttctccatgagttttaaaatcactgcatcatagaatagcagcaaagtttgttcaaataatgatcccattggctgaatggttttatagcttccgtttgactggtctttaggagaaccaggcattctgatgatgaggtccgcttgttttccgatgcttgattccggattgatggttaaagcggcaacaattccgtgtaagctttttgcttttgctgcggtatgaatcaagctttttgtctcgcctgatcctgagccgataataactagatctcctttggcgagcggcggagtgagaatctcacctacaatatgggcgttgaagcccatgtgcatcagtctcatcgcgaaggattttgccatcaggccagaccgccccgcacccgcggtgaaaatttggtgggatgaaagaatgtgatcggcaagctggtcagcttcttcattagaaatataagctactgaattgtgtaactcattgagaatttccgctacgtattcagtcgttttcataggagttatccttggacaatcagctgcttcatttttgaagctgtttccgccttatcagctgcgcttgtaattccgcccccaacaatgacaaggtcagggttttgcttgatcacttctggcagtgtatcaagtttgatgccgcccgcgattgcggtttttgcgttttttacggtatttttgattgtcgttaattcttcgaaagagtttttgccctctgcttgaagatcatagccagtgtggacgcagatgtagtcaacgcctagtgcgtcaatttctttcgcacgggattcgatatctttcacgttaatcatgtccactaagattttcttcttttgttttttggcttcttctactgcgcctttaatcgttgcatcgtctgtagcccctaaaacggtgatgatgtcagcgcctgcttccgacgctttcataatttcgtagcctccggcatccatgattttcaggtctgcaagaaccttcaattgaggaaatgcttcttttatttctttaacggctcttaggccttcattgatgacgaccggtgttccgatttcaactacgtcgatgtattgttctacctctttgacgagctcaatggcttccgggatgttgacgaggtctaatgcaagctgtaattccattgttgattcactccctttttcgaattatttttcattctataggttctcttatttgatgagaagtaggcactttgaagtcaacaagttacttggaggatactgtgaggagagacaatcagatttctttcgcttgattttatgagtgagtataatgaaaaaagagtctgcaaaaaagtaagtaagtgatgatacgtatctaacatacaaaaagattactaaggggggattctattgagccggatggacgacaaaaggtttaattgtgagaaggaattaacgcttgcagtgattggcggtaaatggaagatgctcattttatggcatttaggaaaagaaggcacaaaacggttcaatgaattaaaaacattgattcctgatattacgcagaagatcctcgtgaatcagctgagagaacttgagcaggatatgattgttcacagggaagtgtatccggttgtcccgccgaaggttgagtattctctgaccccgcatggagaaagcctcatgcctattcttgaagccatgtatgagtgggggaaaggctatatggaattgattgatatcgacaaaaatgtcatgaaagaatcgttgtaagacgctcttcgcaagggtgtcttttttttgcctttttttcggtttttgcgcggtacacatagtcatgtaaagattgtaaattgcattcagcaataaaaaaaaattgaacgcagcagtttggtttaaaaatttttatttttctgtaaataatgtttagtggaaatgattgcggcatcccgcaaaaatatccctgtaaataaactggaatctttcggcatcccgcatgaaacttttcacccatttttcggtgataaaaacatttttttcatttaaagtgaacggtagtaagataaaaaatattgaaaacaatgaataaatagccaaaattgtttcctgttaggataggggttcttgcggtctttatccgcttatgttaaacgccgcaatactgactgacggctgcccgttttaatagcggcaatctgttttttgtttggaagcactgctttttaagtgtagtactttgggctatttcggttgttagttcataagaattaaaagctggtatggataaaaaagagaaaatgctctgcacaagttcactgtttatgaagactaggggaggtatgaaaatatggaaataactttttatcctttaacggatgcacaaaaacgaatttggtatacagaaaaattctatcctcacacgagcatttcaaaccttgcggggattggtaagctggtttcagctgatgcgattgattatgtgcttgttgagcaggcgattcaagagtttattcgcagaaatgacgccatgcgccttcggttgcggctagatgaaaacggggagcctgtacaatatattagcgagtatcggcctgttgatataaaacatactgacactactgaagatccgaatgcgatagagtttatttcacaatggagccgggaggaaacgaaaaaacctttgccgttgtacgattgtgatttgttccgtttttccttgttcaccataaaggaaaatgaagtatggttttacgcaaatgttcatcacgtgatttctgatggtatctccatgaatattctcgggaatgcgatcatgcacatttatttagaattagccagcggctcagaggcaaaagaaggaatctcgcattcatttatcgatcatgttttatctgaacaggactatgctcaatcgaagcgatttgaaaaggacaaggcgttttggaacaagcaatttgaatcggtgcctgaacttgtttccctgaaacggaatgcttccgcaggaggaagtttagatgctgagaggttctctaaagatgtgcctgaagcgcttcatcagcagattctgtcgttttgtgaggcgaataaagtcagtgttctttcggtatttcaatcgttgctcgccgcctacttgtacagggtcagcggccagaatgatgttgtgacgggaacctttatgggcaaccggacaaatgcgaaagagaagcagatgcttggcatgtttgtttctacggttccgcttcggacaaacattgacggcgggcaggcgtttttagaatttgtcaaagaccggatgaaggatctcatgaagacactccgccaccaaaagtacccgtataatctcctgatcaacgatttgcgtgaaacaaagagctctctgaccaagctgtttactgtttctcttgaatatcaagtgatgcagtggcagaaagaagaggatcttgcctttttgactgagccgattttcagcggcagcggattaaatgatgtctcaattcatgtaaaggatcgatgggatactgggaaactcaccatagattttgattaccgcactgatttattttctcgtgaagaaatcaacatgatttgtgagcgcatgattaccatgctggagaacgcgttaacgcatccagagcataccattgatgaattaacgatgatttctgatgcggagaaagagaagctgcttgcgagggccggcggtaaatctgtgagctaccgtaaggacatgacgatcccggaactgttccaagaaaaggctgagcagctttcagatcatccagcggttgtattcgaagatcgtacattgtcctatcgaacgttacatgaacaatccgcacgcatcgccaatgtgctgaaacagaaaggggttggcccggacagtcctgtcgcggttttgattgaacgttctgaacggatgattacagctatcatgggaattttaaaagccggcggagcctatgtgccgattgatccgggttttcctgcagagcggattcaatatattttggaggactgcggggcggacttcatcctgactgaatcgaaggttgcagcgcctgaagccgatgctgagctgattgacttagatcaggcaattgcggaaggtgcagacgatatgacggaggctgatgtaaacgcgcggaatcttgcctacattatttacacatcgggaacaaccggacgtccgaaaggcgttatgatcgagcatcgccaggttcatcatttggttgaatctctgcagcagacgatttaccaaagcggcagccaaaccctgcggatggcattgcttgcgccgttccactttgatgcgtcagtgaagcagatcttcgcgtcgcttcttttgggacaaaccctttatatcgtaccgaagaaaacagtgacgaacgggaccgcccttgctacatattatcggagaaacagcattgaggcgacggatggaacaccggctcatttgcaaatgctggcagcagcgggcgattttgaaggcctaaaactgaagcacatgctgatcggaggagaaggcctgtcatctgttgttgcggacaagctgctgaagctgtttaaagaagccggcacagcgccgcgtttgactaatgtgtacgggccgactgaaacgtgcgttgacgcgtctgttcatccggttatccctgagaatgcagttaaatcagcgtatgtgccgatcgggaaagcgctggggaataaccgcttatatattttggatcaaaaaggccggctgcagcctgaaggcgtggcgggtgagctttatatcgcgggagacggtgtgggccgaggctatttgcatttgcctgaattaacggaagagaagtttttacaagatccattcgtgccgggcgatcgcatgtaccggaccggggacgtggtgcgctggcttccagatggaacaatcgaatatttaggcagagaggatgaccaggtcaaagtccgcggataccggattgagcttggggaaattgaagccgtgattcagcaggcgccagacgttgcaaaagccgttgttttggcacgccctgacgaacagggaaatcttgaggtttgcgcatatgttgtgcagaagcctggaagcgaatttgcgccagccggcttgagggagcatgcggccagacagcttcctgactatatggtgccggcttactttacagaagtgacagaaattccgcttacgccaagcggcaaagtcgaccgccgcaagctgtttgcactagaggtgaaggctgtcagcggcactgcctatacagcgccgcgaaatgagactgaaaaagcaatcgcagccatttggcaggacgtgctgaacgttgagaaggcggggatttttgacaatttctttgaaacgggcgggcattcattgaaggccatgacccttttaacaaagattcataaggaaacaggcatcgagattccgcttcaatttttgtttgagcatccgacgattgcggctcttgcagaggaagctgatcacagagaaagccgggcattttcggtgattgaacctgctgaaaaacaggagcattatccgctttctctggcacagcagcgaacatatatcgtcagccagttcgaggatgcgggagtcggctacaacatgcctgcggcagcaattctggaagggcctttagatattcaaaaactggagcgcgcatttcaggggttaatccgacgccacgagtcattgagaacatcatttgttcttgaaaacagcacgccgagacagaacattcacgatagcgttgatttcaacatcgaaatgattgaaagaggcggccgctcagatgaggcaattatggcttcattcgttcggacatttgatttggcgaaagctccgctgttcagaatcggtttgctggggcttgaagagaaccgtcatatactgctgtttgatatgcaccatttgatttctgacggtgtatccattggcattatgctggaggagttagcacgcatttataaaggcgaacagcttcctgagcttcgtctccagtataaggactacgctgtatggcaaagcagacaggctgctgaagggtacaagaaggaccaggcttattggaaggaagtctttgcaggcgagctcccggtgcttcagcttctgtccgattacccaagaccgcctgttcaaagctttgaaggggatcgggtgtcaatcaagctggatgcgggggtaaaggatcgcctcaatcgtttggctgaacaaaacggcgccactttatatatggtgatgctgtccgcttactatacgcttttgtcaaagtatacggggcaggatgacatcattgtcgggacaccgtcagcgggcagaaatcactccgatacagagggcattatcgggatgtttgtcaatacgcttgcgattcgcagtgaggtgaagcaagatgagacgtttacccaattgatctcgcgtgtccgcaaacgggtgctgaatgccttttctcatcaggactatccgtttgagtggcttgttgaagatttgaacatcccgcgtgatgttagcaggcatccgctgtttgacacgatgttcagccttcaaaacgcgacagcaggcattccggctgtcggcgatctgtccttgtctgttcatgagaccaatttcaagattgccaaatttgatttgaccgtgcaggcgagagaaaccgatgaaggcattgagcttgatttggattacagcacaaagctgtttaaacaaagcacggcaaacaggctgcttacgcattttgcgcgtttgcttgaagatgctgcggctgatccagagaagccgatttctgagtataagcttctttctgaagaggaggccgcttcgcaaattcagcagtttaacccgggcagaacaccttatccgaaagataaaacaattgttcagctgtttgaggagcaagcggcgaatacgccagaccatactgcgcttcaatatgaaggcgaatcactcacttatcgtgaactgaatgaacgggccaatcgtttagcccgcggcattctttctcttggagctggcgaaggcagaactgcggctgtcttatgcgagcggtcaatggatatgattgtgtcgatcttggcagtattaaaatcaggttcggcttatgttccgattgatccggaacatccgagtcagcggatgcagcatttcttccgtgacagcggagcaaaggtgcttctcactcagagaaaattaaaggctttagcggaagaagcggaatttaagggcgttatcgtgctagccgatgaggaagagagctatcatgccgatgcgcgcaatctcgcactgcctcttgattctgaagcaatggccaacctgacgtatacctctggaacgactggaacacctaaggggaatatcgtgacacatgccaatattctccgcacggtgaaggaaacgaattatctcagcattacagaacaggatacgattctcggtctttccaattacgtgtttgacgcgtttatgttcgatatgttcggatctttgttaaacggagccaagctggtgctgataccgaaggaaaccgttttggacatggctcgtctgtcccgcgtcattgaacgggagaatatcagcattctcatgattacaaccgctttgttccacttgcttgtggacttgaatccggcgtgcttgtcaacgcttcgcaagattatgtttggcggggaacgggcttcggttgagcatgtcagaaaagctttgcaaacggttggaaagggcaagctccttcacatgtatggaccgtctgaaagcacggttttcgcgacgtatcatccggttgatgaattggaggagcacacgctgtctgttccgattggaaaaccggtcagcaatacggaagtatacattcttgacagtacgggacacgtgcagcctgccgggattgccggagagctttgcgtcagtggcgaaggactcgtgaaaggctattacaaccgtccagaactgactgaggagaaatttgttccccatccgtttacatccggcgaacgcatgtataaaacgggagaccttgctagatggctgccgaatggcgacatcgaatttatcgggcgaatcgaccatcaggtgaagattcgcggacagcgcatcgaacttggagaaatcgaacatcagctgcaaacccatgatcgtgttcaggaaagtgttgtgcttgccgttgatcaaggagcgggagataaactgttgtgtgcttattatgtcggagagggagacatctcatcacaagagatgagagagcatgctgcgaaggacttgccggcatatatggttcctgcggtgtttatccaaatggacgagctgccgctgacagggaacggaaaaattgaccggagagcgctgccgattcctgatgccaacgtttcaagaggtgtttcatatgttgcgccacgcaatggaacggaacaaaaagtcgcagacatttgggcacatgtgcttcaggcagaacaagtcggcgtttatgaccacttctttgacattggcggacattcattagcaggcatgaagatgcttgccttggttcatcaggaactgggcgttgagctgtcactcaaggatctcttccagtcaccgacggttgagggcttggcacaggtgattgcctctgctgaaaaagggacagccgcaagtatcagcccggcagagaaacaagatacgtatcctgtttcttcaccgcaaaaacggatgtacgtgcttcagcagcttgaggatgcgcaaacgagctataacatgccggcggttctgcgcctgacaggtgagcttgatgttgaaaggcttaacagcgtcatgcagcagttaatgcagcgtcatgaagccttgagaaccacgtttgaaataaaagatggagaaacggtgcagcggatctgggaagaggctgagtgtgagatagcctatttcgaagccccggaagaagagacagagcggatcgtttctgagtttattaagcctttcaaaatcgaccaacttccactgttcagaatagggcttatcaagcattcagacactgagcatgtgctgctgttcgatatgcatcatattatttctgatggtgcatctgtcggtgtgctgattgaggagctttcaaagctgtacgacggagaaacccttgagccgctccgtattcaatataaggattatgctgtgtggcagcagcagttcattcagtctgagctttacaagaagcaagaagagcattggctgaaggagctggacggagagctgccggtgctgacgcttccgaccgattacagtcggcctgccgttcaaacatttgagggagaccgcattgcattttcattagaagcaggcaaagctgatgctctgcgcaggcttgcaaaagaaacggattccacgctttacatggtgcttctggcttcatacagtgcatttttatcaaaacttagcgggcaagacgatatcatcgtcggttcacctgtggccggacgatctcaagcggacgtcagccgcgtcatcggaatgttcgtcaatacattggcgctgcgcacgtatccgaagggtgaaaagacgtttgctgactatcttaacgaagtgaaagaaacggcactcagcgcttttgatgcgcaggattacccacttgaggatttgatcggaaatgttcaggttcagcgtgacacaagcagaaatccgttattcgatgcagttttttcaatgcaaaatgcgaatataaaggatttaacaatgaaagggattcagcttgagccgcatccgtttgaacggaaaacagccaagtttgacctcacgctgacggctgacgaaaccgacggagagcttacattcgtactcgaatacaatacagctctgtttaagcaggaaacgattgaacgatggaagcaatattggatggagcttttagatgatgttactgggaacccgaaccagctgctttccagcctgtcactggtcaccgagacagaaaagcaagcgcttcttgaggcatggaagggcaaagcgctgcctgtgccgacagacaaaacggttcatcagctattcgaagagactgtccagcgccacaaagaccgcccggctgtcacatacaacggccagtcttggacgtacggcgagctgaatgcgaaggcgaaccgtctcgcgcggattctgatggactgcggcattagcccggatgaccgcgtcggcattctcacgaagccgtcgcttgaaatgtccgccgcggtgctcggcgtcttgaaagccggagcggcgtttgtgccgattgatcctgactacccggatcagcggattgagtatattttacaggacagcggcgcgaagcttctcttgaaacaggaagggatttcagtgccggacagctttacgggagatgtcattcttctcgatggaagccgcacgattctaagcctgccgcttgatgaaaacgacgagggaaatccagaaaccgctgtaaccgcggagaacttggcgtacatgatttacacgtctggaacgaccggacagccgaagggtgtcatggtcgagcaccatgcgcttgtgaacctgtgcttctggcaccacgacgcgttcagcatgacagcggaggaccgcagtgcgaagtacgcgggctttgggttcgacgcttccatttgggagatgttcccgacctggacgatcggtgccgagcttcacgtcattgatgaagcgatccgcctcgatatcgtccgcctgaacgattattttgaaacgaacggcgtaacgatcacgttcctgccgacacagcttgcggaacagttcatggagcttgagaacacatcacttcgcgtattgctcattggaggagacaagctgaagcgcgcagtgaaaaagccgtacacactcgtcaacaactacgggccgacagagaatacggtcgttgccacaagcgcagaaatccatccggaggaaggctcgctttccatcggaagggccattgccaatacgagagtatacattctcggcgagggcaatcaggtgcagccggaaggcgtagccggagagctttgcgtggcggggcgcggactggcacgcggctatctgaatcgagaagacgaaaccgcgaagcggtttgtcgctgatccgtttgtgcctggtgagcgcatgtaccgcaccggcgatttggtgaaatggacgggcggcggcatcgaatacatcggccggatcgaccagcaggtcaaggtccgcggctaccggatcgagctctcagaaattgaagtccagctcgcacagctttctgaggtgcaggatgcggcggtgacagctgtcaaagataaaggaggcaacacagcgatcgcggcgtatgtcacaccggaaacagctgacatagaagcactgaaatcagcactaaaggaaaccctgccggattacatgatcccggcgttctgggtgacgctggacgagcttccggttacggcaaacggcaaagtggaccgtaaagccttgcctgagccggacatcgaagcgggaagcggagaatacaaagcgcctacgaccgacatggaagagctgcttgccggcatctggcaggacgtgcttggaatgtctgaagtcggtgtcaccgacaatttcttctcgcttggcggagattccatcaaaggaattcaaatggcgagccgcttgaaccagcacggctggaagctggaaatgaaagatctcttccagcacccgacgatcgaagagctcacccagtacgtagagcgtgccgaaggcaaacaggcagaccaaggcccggtagagggcgaagtcatcctgacgccgatccagcgctggttctttgaaaagaacttcacgaacaagcaccactggaaccaatcggtgatgcttcacgccgcgaagggctttgaccctgaacgggtggagaaaacattgcaggcgctgatcgagcatcatgacgcgctccgtatggtctatcgtgagggactggaagacgtcattcaatacaacagaggtcttgaagctgcttccgctcaattggaggtcatccagattgagggccaagctgcagattacgaagaccgtatagagagagaagcggagcgtttgcaaagcagcatcgacttgcaggaaggcggcttgttaaaagcaggattgttccaagcggaagacggagaccacttgcttcttgccattcaccacttagtggttgacggcgtgtcgtggcggattttactggaggatttcgccgcggtatatacacagcttgagcaaggcaatgaaccggttctcccgcagaaaacacattcatttgcagagtatgcagagagattgcaagacttcgcgaactccaaagcctttttgaaagaaaaagagtattggagacagctcgaagaacaagctgtcgcggcaaagcttccgaaagaccgcgaatctggtgatcagcgaatgaaacatacaaagacaattgaattctcgctgactgctgaagagacagaacagctcaccacaaaggtgcatgaggcatatcacacagaaatgaatgatattttgctgacggcattcggattggcaatgaaggagtggacgggtcaagatcgagtaagtgttcatttagaggggcatggacgtgaagaaatcatagaagacctgaccatttctcgcacagtcggctggtttacaagtatgtacccaatggtgctcgatatgaagcatgcggatgatctgggctaccagctgaagcaaatgaaagaagatatcagacatgtgccgaataagggagtcggatacggcattctgcgctatctgacggcacccgaacataaagaagatgtggcgttctcgattcagccggatgtcagcttcaactatttaggtcagtttgacgaaatgtcggatgcaggtttgtttacgagatcagagctgccatcaggacagtcattaagccctgaaacagaaaaaccgaatgcgctggatgttgtcggatatatcgaaaacggaaaactgacgatgtcactggcctatcattctcttgaatttcatgaaaaaacagtacaaacattcagtgacagctttaaagcgcatcttctcagaatcattgaacattgcctatctcaagacggtacggaactgaccccgagtgatcttggtgacgacgatttgacgctggatgagctggataaattaatggaaattttctaatagaggtggcatatgagcaaaaaatcgattcaaaaggtgtacgcactgacaccgatgcaggagggaatgctgtatcatgcgatgcttgatccgcattcttcctcgtacttcacacaattagagcttgggattcacggcgcttttgatcttgaaatctttgagaaaagcgtcaatgaactgattcggtcatacgatattctccgtacggtatttgtgcatcagcagctgcaaaaaccgcgtcaggtcgtgttagcggaacgcaaaacaaaggtgcattatgaggatatcagtcatgcagacgagaaccgccagaaagagcacattgagcgttacaaacaagacgttcagcgccaaggctttaacctggcaaaagacatattgttcaaggtagcggttttccgccttgatgcagatcagctgtatcttgtctggagcaatcatcatattatgatggacggctggagcatgggcgtcctcatgaaaagcctgttccaaaactatgaagcgctcagagcaggaaggacacctgcaaacggtcaaggcaagccttactccgactacatcaaatggcttggaaaacaggacaatgaagaagcggagagctactggagcgagcgcttggcgggttttgaacagcccagcgtgctcccgggccgcctgcctgtaaaaaaagacgaatacgtcaataaagaatattcctttacatgggacgaaacactggttgcccgcattcagaaaaccgcaaaccttcatcaagtgacagggcctaacctatttcaggccgtttgggggattgttctcagcaaatacaactttacggatgatgttgtcttcggaacggtcgtctcaggaaggccgtctgaaatcaatggaattgaaacgatggcggggctgtttatcaacaccattccagtgcgggtgaaagttgaacgagatgctgcattcgctgatattttcacagctgttcagcagcatgcagtagaggcagagcgttacgattacgtgccgctctatgagattcaaaaacgctcagctcttgatggcaatctcttaaaccatcttgtcgcgtttgaaaattatccgcttgatcaagagcttgaaaacggcagcatggaagaccgcctcgggttttcgattaaggtagaaagcgcatttgaacaaacgagcttcgatttcaacctgattgtgtatccgggcaaaacgtggaccgtcaaaattaaatataacggagccgcctttgattccgcttttatcgaacggacagcggagcaccttacccgcatgatggaagcagctgtcgatcagccggccgcttttgtgcgtgagtacgggcttgtgggagacgaagagcagcggcaaattgtcgaggtgtttaacagcacgaaagccgaactccctgcaggaatggctgttcaccaagtgtttgaagagcaagcgaaacggacgccggcgagcactgccgtcgtatatgaaggaaccgtgctgacgtaccgcgagctgaatgcagcggctaaccgtctggcgagaaagcttgtcgaacaaggccttcaaaaaggggaaacagcagcgattatgaacgatcgatcagtagaaaccgttgtcggcatgctggctgtgttaaaagcaggcgccgcatatgtgccgcttgatccagcgcttccgggggatcgtcttcgtttcatggcagaggacagctccgttcgaatggttttgaccggaaattcttatacagggcaggcacatcagctgcaggtgccggttcttacactggacataggcattgaagatggcgaagctgacaatctcaacctgccatccgccccgtctgatttggcgtacatcatgtacacatccggttcaacgggcaaaccgaaaggcgtcatgatcgaacataaaagcattctgcgcctcgtcaaaaatgccgggtacgttcctgttactgaagaggaccgcatggcgcaaacaggggcagtcagctttgatgccggaacgtttgaggtattcggcgcactgctgaatggcgcagcgctttatccggtcaaaaaagagacactgcttgatgcgaaacaatttgctgcattcctgcgtgagcaaagcatcacaactatgtggctgacatcacctttattcaaccagcttgctgcaaaggatgcgggtatgttcggcacactgcgccatttaatcatcggcggagatgcccttgtcccgcatattgtcagcaaagtaaaacaggcatcgccgtcgctttcattgtggaacggatacggcccgacagaaaacacgacgttttcaaccagttttctgatcgaccgcgagtatggcggctctatcccaatcgggaagccgatcggaaattccactgcctatattatggatgagcagcaatgcctgcagccaatcggcgcgcctggtgagctttgcgtaggcggaatcggtgtagcgcgtgggtatgtcaatctccctgagctgacggagaagcaatttctggaagacccgttcagaccgggtgagagaatttaccgcactggtgacttggcaagatggctgccggacggcaatatcgaatttttaggcagaatcgacaaccaagtgaaggtgcgcggcttccgaattgagcttggcgaaattgaaacaaaactgaacatggctgagcatgtgacagaagccgcggtgatcatccgcaagaacaaagcagacgaaaatgaaatttgcgcgtacttcacggcggatcgtgaagtggctgtgagtgagctgagaaaaacactgtctcagtctttgcctgactatatggtccctgcccacctgattcaaatggacagcctgccgctcacgccaaacgggaaaatcaacaaaaaggaactgcctgcaccgcaatcagaagccgtgcagccggaatacgcagcaccaaaaacagagagtgaaaagaaattagcggagatctgggaaggaatactcggcgtcaaagcaggcgttaccgataacttctttatgatcggcggccattctttgaaagcgatgatgatgacggcgaaaattcaagagcattttcataaggaagttccgataaaagtgctttttgaaaagccgactattcaagaactggcactgtatttggaagagaacgaaagcaaggaggagcagacgtttgaaccgatcaggcaagcatcttatcagcagcattatcctgtatccccggcccagcggagaatgtatatcctcaatcagcttggacaagcaaacacaagctacaacgtccccgctgtacttctgctggagggagaagtagataaagaccggcttgaaaacgcgattcagcaattaatcaaccggcacgaaatcctccgtacatcgtttgacatgatcgacggagaggttgtgcaaaccgttcataaaaacatatcgttccagctggaggctgccaagggacgggaagaagacgcggaagagataatcaaagcatttgttcagccgtttgaattaaactgcgcgccgctcgtccgttcgaagcttgtccagctggaagaaaaacgccacctactgctcattgatatgcatcatattattactgacggcagttcaacaggcattctaatcggtgatcttgccaaaatatatcaaggcgctgatctggaactgctacaaattcactataaagattacgcagtttggcacaaagaacaaactaattatcaaaaagatgaggaatactggctcgatgtctttaaaggcgaactgccaatactggatcttcccgcggatttcgagcggccagctgaacggagctttgcgggagagcgcgtgatgtttgggcttgataagcaaatcacggctcaaatcaaatcgctcatggcagaaacagatacgacgatgtacatgtttttgctggcggcgttcaatgtactcctttccaagtacgcgtcacaggatgatatcattgttggctcgccgacagctggcagaacacatcctgatctgcaaggtgtgccgggtatgtttgtcaacacggtggcactcagaacggcaccagcgggagataaaaccttcgcgcaattccttgaagaggtcaaaacagccagccttcaagcattcgagcaccagagctatccgcttgaggagctgattgaaaagcttccgcttacaagggatacaagcagaagtccgctgttcagcgtgatgttcaacatgcagaatatggagattccttcattaagattaggagatttgaagatttcctcgtattccatgcttcatcatgttgcgaaatttgatctttccttggaagcggtcgagcgtgaagaggatatcggcctaagctttgactatgcgactgccttgtttaaggacgagacgatccgccgctggagccgccactttgtcaatatcatcaaagcggccgcggctaatccgaacgttcggctgtctgatgtagatctgctttcatctgcagaaacggctgctttgctagaagaaagacatatgactcaaattaccgaagcaacctttgcagctctttttgaaaaacaggcccagcaaacacctgaccaccctgcggtgaaggctggcggaaatctgctgacctatcgcgagcttgatgaacaggcgaaccagctagcgcatcatcttcgtgcccaaggggccggaaatgaagacattgtcgcgattgttatggaccggtcagctgaagtcatggtatccattctcggtgtcatgaaggcgggggcagctttccttccgattgatcctgatacacccgaagaacgaatccgttattcattagaggacagcggagcaaaatttgcggtcgtgaatgaaagaaacatgacggctattgggcaatatgaagggacaatcgtcagccttgatgacggtaaatggagaaatgaaagcaaggagcgcccatcatccatttccgggtctcgcaatcttgcatacgtcatttatacgtccggtacgaccggaaagccaaagggcgtgcagattgagcatcgcaatctgacaaactatgtctcttggtttagtgaagaggcgagcctgacggaaaatgataagactgtattgctttcatcttacgcatttgaccttggctatacgagcatgttccccgtacttctgggcgggggcgagctccatatcgtccagaaggaaacctatacggcgccggatgaaatagcgcactatatcaaggagcatgggatcacttatatcaaactgacaccgtctctcttccatacaatagtgaacaccgccagttttgcaaaagatgcgaaatttgaatccttgcgcttgatcgtcttgggaggagaaaaaatcatcccgactgatgttctcgccttccgtaagatgtatggacataccgaatttatcaatcactacggcccgacagaagcaacgatcggcgccatcgccgggcgggttgatctgtctgagccggatgcatttgcgaaacgcccgacaatcggacgcccgattgcgaatgccggcgcgcttgtcttaaatgaagcattgaagcttgtgccgccgggagcgagcggacagctctatatcacgggacaggggcttgcgagagggtatctcaacaggcctcagctgacagccgagagatttgtagaaaatccatattcgccgggaagcctcatgtacaaaaccggagatgtcgtacgaagactttctgacggtacgcttgcatttatcggccgggctgatgatcaggtgaaaatccgcggctaccgcattgagccgaaagaaattgaaacggtcatgctcagcctcagcggaattcaagaagcggttgtactagcggtttccgagggcggtcttcaagagctttgcgcgtattatacgtcggatcaagctattgaaaaagcagagctccggaagcagctttccctaacactgccgtctcatatgattcctgctttctttgtgcaggttgacgcgattccgctgacggcaaacggaaaaaccgacagaaacgctttgccaaagccgaacgcggcacaatccggtggcaaagccttggccgcaccggagacagcgcttgaagaaagcttatgccgcatttggcagaaaacgcttggcatagaagccatcggcattgacgacaattttttcgatttaggcggccattcattaaaagggatgatgctgattgccaacattcaggcggaattggagaaaagcgtaccgcttaaagcactgttcgagcagccgactgttcgccagctggcggcttatatggaggcgtctgctgtttcaggcggccatcaagtcctcaaaccggctgacaagcaggatatgtatccattgtcatccgcacagaaacggatgtacgtgctcaatcagcttgaccgccagacgataagctacaacatgccatctgttcttctaatggaaggagagcttgatatttcgtgcctgcgcgattcactcaatcagcttgtgaaccgtcacgaatcattgcggacgtcatttatggaagctaatggtgagcctgttcagcgcatcattgagaaggcggaggttgatcttcatgtgtttgaagccaaagaagacgaagcggaccaaaagattaaggaatttatccggccattcgacttaaacgacgcaccgctcattcgcgcagctttgcttcgaatagaagcgaaaaaacatttgctgcttttagatatgcatcatatcatcgcagacggcgtctcaagaggcatttttgtaaaagaattggcgctgctttacaaaggagagcagcttccggagccggcgcttcattataaagatttcgccgtttggcaacatgaagctgagcaaaaagaacggatgaaggagcatgaggcgtactggatgtcagttctttcaggcgagctgccagagcttgatctcccgctcgattacgcccgtccgcctgtgcaaagctttaaaggagatacgatccgtttccgtacgggaagtgagacggcaaaggcggtagaaaaactgcttgcggaaaccggaacgaccttgcacatggtgctccatgctgttttccacgtctttttaagcaaaatttccggacagcgggatatcgtcatcggctccgttactgccggccggacgaatgctgatgttcaggacatgccgggaatgttcgtcaatacacttgccctgagaatggaagcgaaagaacagcaaacatttgcggagcttttggagcaagcaaagcagacgaacctgtcagcgcttgagcatcaggagtatccgtttgaagatctggttaatcagcttgatctccctcgggatatgagccgaaacccattgtttaatgtgatggtgacgacagaaaaccctgataaagaacagcttacattgcaaaatctgagcatttcaccttatgaggctcatcagggaacttctaagtttgatctgacactgggcggatttactgatgaaaatggcattggcttgcagctcgaatatgcgacagatctgttcgcgaaagaaacagctgaaaaatggagcgaatacgttctgcggctactaaaggctgttgcggataacccgaaccagccgctttccagcctgtcactggtcaccgagacagaaaaacaagcacttcttgaggcatggaagggcaaagcgctgcctgtgccgacagacaaaacggttcatcagctattcgaagagactgtccagcgccacaaagaccgcccggctgtcacatacaacggccagtcttggacgtacggtgagctgaatgcgaaggcgaatcgtctcgcgcggattctgatggactgcggcatcagcccggatgaccgcgtcggcattctcacgaagccgtcgcttgaaatgtccgccgcggtgctcggcgtcttgaaagccggagcggcgtttgtgccgattgatcctgactacccggatcagcggattgagtatattttacaggacagcggcgcgaagcttctcttgaaacaggaaggcatttcagtgccggacagctttacgggagatgtcattcttctcgacggaagccgcacgattctaagcctgccgcttgatgaaaacgacgagggaaatccagaaaccgctgtaaccgcggagaacttggcgtacatgatttacacgtctggaacgaccggacagccgaagggtgtcatggttgagcaccatgcgcttgtgaacctgtgcttctggcaccacgacgcgttcagcatgacagcggaggaccgcagtgcgaagtacgcgggctttgggttcgacgcttccatttgggagatgttcccgacttggacgatcggcgctgagcttcacgtcattgatgaagcgatccgcctcgatatcgtccgcctgaacgattattttgaaacgaacggcgtaacgatcacgttcctgccgacacagcttgcggaacagttcatggagcttgagaacacatcacttcgcgtcctcttgaccggaggagacaagctgaagcgcgcagtgaaaaagccgtacacactcgtcaataactacgggccgacagaaaatacggtcgttgccacaagcgcagaaatccatccggaggaaggctcgctttccatcggaagggccattgccaatacgagagtatacattctcggcgagggcaatcaggtgcagccggaaggcgtagccggagagctttgcgtggcggggcgcggactggcacgaggctatctgaatcgagaagacgaaaccgcgaagcggtttgtcgctgatccgtttgtgccgggtgagcgcatgtaccgcaccggcgatttggtgaaatggacgggcagcggcatcgaatacatcggccggatcgaccagcaggtcaaggtccgcggctaccggatcgagctttcagaaattgaagtccagctcgcccagctttctgaggtgcaggatgcggcggtgacagctgtcaaggataaaggcggcaatacagcaatcgcggcgtatgtcacaccggaaacagctgacatagaagcactaaaatcagcactaaaggaaaccctgccggattacatgatcccggcgttctgggtgacgctgaacgagcttccggttacggcaaacggcaaagtggaccgcaaagccttgcctgagccggacatcgaagcgggaagcggagaatacaaagcgccgacgaccgacatggaagagctgcttgccggcatctggcaggacgtgcttggaatgtctgaagtcggtgtcaccgacaatttcttctcgcttggcggagattccatcaaaggaattcaaatggcgagccgcttgaatcagcacggctggaggctggaaatgaaagatctcttccagcatccgacgatcgaagagcttacccaatatgtagagcgtgccgaaggcaaacaggcagaccaaggcccggtagagggcgaagtcatcctgacgccgatccagcgctggttctttgaaaagaacttcacgaacaagcaccactggaaccaatcggtgatgcttcacgccgcgaagggctttgaccctgaacgggtggagaaaacattgcaggcgctgatcgagcatcatgacgcgctccgcatggtctaccgcgaggaaaacggggacatcgttcaggtgtataaaccgatcggtgagagcaaggtcagcttcgaaatcgtggatctgtacggctccgatgaagagatgctgagaagccagattaagcttctcgcgaacaagctgcaaagcagtctcgatctgcgaaacgggccgcttttaaaggcggagcaatatcgcacagaagctggggatcacctgctcattgctgtacaccatctcgtggtcgacggtgtgtcatggcggattttgcttgaagactttgcttcaggctacatgcaggctgagaaagaagagagccttgtcttcccgcaaaaaacaaactccttcaaggattgggcggaagaactggcggcattcagccaatcagcgcatcttttacagcaggctgaatactggtcgcaaattgccgctgaacaggtttctcctttaccaaaggattgtgaaacagagcagcggatcgtcaaggatacatcatccgtcctatgtgaattaacggaagaagacactaagcatcttttaacagatgttcatcagccatatggaactgaaatcaacgatattcttctcagcgcgctcggtttgacaatgaaagaatggacaaagggggccaaaattggcattaaccttgagggacacggccgggaggacatcatcccgaatgtgaatatctccagaacggtcggctggtttacggcacaataccctgttgtgctcgacatgtctgaagcagatgcctcagctgtgatcaaaacagtcaaagaaaacctgcgccgcattccggacaaaggtgttggctacggcattcttcgttatttcacagaaacagcggaaacaaagggcttcacaccggagatcagcttcaactatttgggccaattcgacagtgaagtcaaaaccgatttctttgaaccgtccgctttcgatatggggcgccaagtaagcggagaatcagaggcgctgtacgcattaagcttcagcggcatgatcagaaacggccggtttgtgctttcctgctcctacaatgagaaggagtttgaaagagctacagtcgaggagcaaatggaacggtttaaagaaaacctcctgatgctaatccgccattgcacggaaaaagaagacaaggaattcacaccaagcgacttcagcgccgaagaccttgaaatggacgagatgggagatatctttgacatgcttgaggagaatttaaaataaaacgcaagggaattacagaaggcgggagcgaaacatatgagtcaatttagcaaggatcaggttcaagatatgtattacctatcgccgatgcaggaagggatgctttttcatgccatcctgaatcccggccaaagcttttaccttgaacaaatcacgatgaaagtaaaaggtagcttgaatatcaaatgtcttgaagaaagcatgaatgtgatcatggaccggtacgatgtatttcgtaccgtgttcattcacgaaaaagtaaaaaggcctgtccaagtcgtattgaaaaaacggcagttccaaatagaagaaatcgatctgacacacttaacgggcagcgagcaaacagccaaaatcaatgagtacaaagaacaggataagatcaggggttttgatttgacgcgggatattccgatgcgggcagccattttcaagaaagctgaagaaagctttgaatgggtgtggagctaccaccacattattttggacggatggtgcttcggcatcgtcgtacaggatctatttaaggtatacaatgctctgcgcgaacaaaagccgtacagcctgcccccgtcaaaccgtataaagactacatcaagtggcttgaaaagcaggataaacaagcatcactgcgttactggcgcgagtatttagaggactttgaaggacaaacgacgtttgcggagcaaagaaagaaacaaaaggacggctatgagccgaaagagctgctcttttcactgccggaggcggaaacaaaggcctttaccgagcttgcaaaatcgcagcataccactttaagtacggcgctgcaggcagtctggagcgtattgatcagccgctatcagcagtctggcgatttggccttcggtacagttgtttcagggcgtcccgcggaaatcaaaggcgttgaacatatggtcgggctgtttatcaacgttgtcccgagacgtgtgaagctgtctgagggtatcacatttaacggcttgctcaagcagctgcaggagcaatcgctgcagtctgagccgcaccaatatgtgccgctttatgacatccaaagccaggccgatcagccgaaactgattgaccacatcattgtttttgagaactatccgcttcaggatgcgaaaaatgaagaaagcagtgaaaacggctttgatatggtggatgttcatgtttttgagaagtcgaattatgatctcaacctgatggcttcccctggagatgagatgctgattaagcttgcctataatgagaatgtgtttgatgaggcgtttatcctgcgcttgaaatctcagcttctcacagcaattcagcagctcatccagaatcctgatcagcctgtcagcacgatcaacctcgttgacgacagggagagagaatttttgctaaccggcttaaacccgccggctcaagctcatgaaacaaagcctctgacggattggttcaaggaagcagtgaacgtcaatccggatgcgccggcgcttacgtattccggccagaccctgtcttatcgcgaattagatgaggaagcgaaccgccttgcacgccggctgcaaaaacacggtgcgggcaaaggctctgttgtagcgctgtacacgaagcgctcacttgaactggtaatcggcattctcggtgtattaaaggcgggagcagcctatctgccggttgatccgaagctgccagaggaccgaatctcgtatatgctggctgacagtgcggcagcctgtcttctgacgcatcagaagatgaaagaacaagcggctgagctgccgtatacaggcacaacgctcttcattgatgatcaaacacggtttgaagaacaggcaagcgatcctgcaaccgcgattgatcctaatgatccggcatatatcatgtacacgtccggcacaaccggaaagccaaagggcaatatcaccactcatgccaatattcaaggattggtcaagcatgtagactacatggcattctctgagaaagatacattcttatctgtttccaattacgcctttgacgcatttacctttgatttctatgcttctatgctgaatgcggcacggctcattatcgcagatgaacatacgctgcttgatacagaacggctcacagatctgatcctgcaagagaatgtcaatgtcatgtttgcgacaaccgcactatttaatcttctcacggatgcgggagaggattggatgaagggactacgctgtatattattcggcggagagcgcgcgtcagtgcctcatgtcagaaaagcgctgcgggtcatggggccgggcaagctgattaactgctacgggccgactgagggaacagtgtttgcgactgctcacgtcgtgcatgatataccggattccatctcctcattgccgatcggaaagccgatcagcaatgccagtgtttatattctgaacgagcaaagccagctccagccattcggggcgatcggtgaactgtgcatcagcggaatgggcgtgtcaaaaggatatgtaaatcgtgctgacctcacgaaggaaaagtttattaagaacccgttcaagccgggagaaacgctttaccgcacaggggatttagcgcgctggctgccggatggaacgattgaatacgccggccgtattgacgaccaggtcaaaatacgtggacaccggattgagcttgaagaaatcgaaaagcagctgcaggaatacccaggtgtgaaagatgcggtcgttgtggcggaccgccctgagtctggcgatgcatcaatcaatgcctaccttgtgaaccgaacgcagctttcagctgaagacgtgaaggcgcacctgaaaaaacagcttcctgcttacatggtgccgcaaacctttaccttcttggatgagcttcctttaacgacgaacgggaaagtcaataaacggctgctcccaaaacctgatcaggatcagctggcggaagaatggattggaccgcggaacgagatggaagaaacaatcgcacaaatatggtctgaggttctcggcagaaagcaaattggcattcatgacgatttctttgcgctcggagggcattccttgaaggccatgaccgccgcgtcccgcatcaagaaagagctcgggattgatcttccagtaaagcttttgtttgaagcgccgacgatcgccggcatttcagcgtatttgaaaaacgggggccctgatggcttgcaggatgtaacgataatgaatcaggatcaggagcagatcattttcgcattcccgccggtcttgggctatggccttatgtaccaaaatctgtccagccgcttgccgtcatacaagctgtgcgcctttgattttattgaggaggaagaccggcttgaccgctatgcggatttgatccagaagctgcagccggaagggcctttaacattgtttgggtattcagcgggatgcagcctggcgtttgaagctgcgaaaaagcttgaggaacaaggccgtattgttcagcggatcatcatggtcgattcctataaaaaacaaggtgtcagtgatctggacggacgcacggttgaaagtgatgtcgaagcgttgatgaatgtcaatcgggacaatgaagcgctcaacagcgaagccgtcaaacaaggcctcaagcaaaaaacacatgccttttactcatactacgtcaatctgatcagcacaggccaggtgaaagcagatattgatctgctgacttccggcgctgattttgacatgccggaatggcttgcatcatgggaagaagctacaacaggtgcttaccgtatgaaaagaggcttcggaacacacgcagaaatgctgcagggcgaaacgctagataggaatgccgggattttgctcgaatttcttaatacacaaaccgtaacggtttcataaatgaagtgatgaaaggaggagacagccaatgagccaactcttcaaatcatttgatgcgtcggaaaaaacacagctcatctgttttccgtttgccggcggctattcggcgtcgtttcgccctctccatgcttttttgcagggggagtgcgagatgctcgctgccgagccgccgggacacggcacgaatcaaacgtcagccattgaggatctcgaagagctgacggatttgtacaagcaagaactgaaccttcgccctgatcggccgtttgtgctgttcggacacagtatgggcggaatgatcaccttcaggctggcacaaaagcttgagcgtgaaggcatctttccgcaggcggttatcatttctgcaatccagccgcctcatattcagcggaagaaagtgtcccacctgcctgatgatcagtttctcgatcatattatccaattaggcggaatgcccgcagagcttgttgaaaataaggaggtcatgtcctttttcctgccttctttccgatcagattaccgggctcttgaacaatttgagctttacgatctggcccagattcagtcgcctgttcatgtctttaacgggcttgatgataaaaaatgcatacgagatgcggaaggctggaagaagtgggcaaaagacatcacattccatcaatttgacggcgggcacatgttcctgctgtcacaaacggaagaagtcgcagaacggatttttgcgatcttgaatcagcatccgatcattcaaccgtgatcaaaagcggacagcttcggctgttccgctttttttgtgttgaatgccaatttttgcatggtataatagtcgaaatactcaaataaaggcaggtcgaaacatgcgcacgtctcccaggatgaaatggtttgtattgctgtttacgtttgttttcgccatcggaatgaactcattcagaaattcctttcaattttttatgctgccaatggcagatgccttccatgccgacaggtcgctgatctcggtttctgtcagcatttttatgatcacaaccggcatcgtccagttttttgtcggtttttttatcgaccgtttcagtgtcagaaaaattatggcgctgggagctgtctgcatcagcgcaagctttttggtgcttccttattcaccgaatgttcatgtgttttccgccatttacggtgtgcttggcggaatcggctattcctgcgcggtcggcgtgacgacccagtacttcatcagccgttggtttgacacacataaaggtctggcgcttgctattttgaccaatgccaactctgcgggcctgctgcttctctcgcccatttgggctgcggctccgtatcatgccggctggcagagcacctataccattttgggaatcgtcatggcggctgttctgctgccgctcctcgtctttgggatgaagcacccgccacatgcgcaagcggaaactgtgaaaaaatcttatgattggcgagggttttggaacgtgatgaagcaatcccgcctcattcatatcctgtacttcggcgtgtttacttgcggatttacaatgggaattattgatgctcacctcgtcccgatactgaaggatgcgcatgtctctcatgtcaacggaatgatggccgcgttcggggcatttatcatcattggcggattattggcgggctggctgtcagatctcctcggcagcagaagcgtcatgctatccatcttatttttcattcggctgctcagcctcatttgcctgctcattcccattctcggaattcatcacagcgacctttggtacttcgggtttatcctgttattcgggctcagttacacaggcgtgatcccgctgaccgcggcgtcaatttcggaaagctatcaaacaggattgatcggatcgctgttaggcatcaatttctttatccatcaggttgccggagctcttagcgtgtatgcgggcggtttgttttttgacatgactcatggttatttgctgattgtcgctgtgtgcatcgtgtttgtgggtttatcggctgtaatagagctggtgccgtttttagataaacagaaggcaaaagaaacccaccattcaatataaaaggatcagcactgtcaatgctgatcctttttaaatttgagtttttttgtttcggtatttttaaggataatctccttgaatctgttcatctcctcttcggagtgaaaaaaatgtttggggatcgcaatatattggccacttgatgtattgaccctgaagatatttttatattcgaaaacagctgtaatttcatcccaattgaaaatgaggtcatattttttagaacatatacgaattccttcttggttcagagtatatgttcttttagatttcatccgttcgttcttcttgtatgctctggaaaacttcacatatagaagaaggaggagcagcagtgtaaacagaacggacatcacgataatcaacatactgttcataaacaagttaagcgcgtcactgccataaacgatacggggccatccgttaatgaagttaactgcagcaaatatggtgcaaaacaacagaaagtaaaagcatgatatttttgcgatttgataaaaaaagatttctcttacatccttaaaagcgatttctcctggaagattgatactttcactagcatattgaatcatacggtaaacctacacctctaaccatgtttttcctttcagtctagcataatttctcatttttttgcaggcataccagggcgctttgtttttttctccagattgatattgctccccaccacgccaatcataatacaaacagccccggcaagatgataccaggccaggctttcgttgagaatcataactcctgcaatcatcgtcacaatggtagatacatgattaaaagcactcattttaaacgcctcaattcgcgacagcgtatagttagacagaaatgaagtgacaagtgaagacagcacgcccaaatacacaatggcgagaacgaagccgggctcccggaacggcagaaaataagtgccgactgttcccgccgctccgtgacgcacaagggcgatggcgttgaagacgacaaagccgatggctgacatgatgtaggtgagctcggtcagcttgaaccgctgcgtcatttttctggcagcagtattgtacatcgctgaggacaaagcggacaataggatcagcaaagacccttttaagctggctgattccacgtcaacgcctttcatcacaaaaataaacatgacgccggcaacggataaaaccgtgaaccccttttgggtccacgttgggcgttcctttaaaacataagcggcaaagaccatcgtgaaaatcggaatggctgcctgaataattcccgcttcagaggaggacgagtacacaaggccaaatgcctgaaagctgaaaaataacgcgggatacagcagggcgagcggcaaaatggcaatgacgtcctttacgcggattgatagctttacccagccgaataagatcggtacagtggccgcagcaaacgcaatggtgaaccgatgcgccaaaatatcaaacggctctgctgtttgcagtgcgatttttacgaatagaaaggataaaccgataatgaacgaatataaaatagccgctatataagcgggggcttgctgatgtttaaccataatgggaatggctcctttacctgaattgcagcgccggtcgctccctttattgtatggccgcggtcagaacggtacaatgagaaaaacaatgaactgtaccggtacaaaacagggggagaaggcatggagaaatatatgagtctattaacgaagatagaggagatgatgcaaagcaccgcctatcaagaaggagacaggcttccatctatccgtcagctgtccgcccgctaccaagtcagcaaaagcacagtgatccgcgcgctgcaggagctggaaaaacgccaccttatctattccgttccgaaaagcggctattatattgtgaaaaagacgggaaaagccaaaagcgggcagcagggtcccattgactttgccacatctgcgccggatccagatgtgtttccgtatcttgattttcagcactgcatcaacaaagcgattgatacatacaaaaacgatttgtttatttatgggacgccaaaggggcttccatcactcatccgcgtactccgaaagctcttggccactcaacaggtatttgcggatgaacggcatattttcattacatcaggtgtccagcaggcgttatccttgctttgtgccatgccgttcccaaatgggaaagagaagatcgccattgaacagccgggctaccatttgatggtcgaacagcttgagacgcttgggattcccgccatcggggtgaaacgaacggaagaagggcttgatatagccgaggttgagcggttatttcaaacagaatcgattaaatttttttatacgatgccccgcttccataacccgcttggctgctctttgtcagagcgtgataaacaggagcttgtgagactggcagaagcgtatgatgtctacctcgttgaggatgattacctcggtgatctggaggaaaataaaaaggcagatccgctgtacgcatatgatctgtcctcacatgtcatctatttgaaaagcttctcgaaaatgatgttccccggccttcgcgtgggggcggctgttttgcccgaagcgctgactgacacgttctatgcgtacaaaaagctgaacgacatcgactgttcgatgatttctcaagcggcattggagatttacctgaaaagcggtatgtacggcaggcataaggagaaaatcagaaattcttataaagagcggtcgctgaggctacatcaagccattcaaacacacaggcagctgggaagcggacgctttacgttctccagcgggcaggcaccctgtatgcacacccatctggtgcttcctcaggatctgcccgcctcaagagtgattcatagactggaaaaacaaggggttctccttgtggcgatagaccgtcattatttatcagattatccgaaagaaaatctattaaaaatcaatatttccaatgtgaaaacggaagatattgagcgcggtgtcaagctgttgatgagccatttataaaagctcttcgtacgagaccattgtgatatcctcggggaaatcagggtgtgcggcgcatacagccattttgtagccgggatcgacctcatacgttttgatatagcatggggaatggctgtccggaagctcaatggatacttgtccgtcctggtgcaggcgcactgaaaaggaatcaagcggaagcgataagcctttgccttcctgtttgataaagctttctttcattgaccatagatgataaaaatagtctgtctgctcgtccttgtcttttgctaaaaggtcgctgtactctgtttttgaaaagaagcgcttggcgatctcaaggctgatcggtttcgttttttcgatatctatgccgatcggctgtgaatcaaacgcgcaaatgacccagcgtccggagtgagaaatgttgaaatgagcgtcgggaagatcagggatgcacggcttcccgtattcctgcgtgctaaagcggatatcggatttgtccaactgatactgcctgcttatgactgagcgaacgagcacatctcccagcagggtgcggtgagcatcttctttatgataaaatctccggcatttctcccgtttttcaggtgctatgaaagacatgaaccgttcattttcttcctgtgaaagcgggcggtccatataaattccgtaaatcttcattctagatcctccgtctgcaaaagattgtcaaaaccatcctatcatacttccacaagactcatatagaggagaaaataaaaaaacaaagccaaggcggctttgttttagtggacaggcggagatgctttcacagcggctgtccgccttgccacagcataattcagcagctggattgactgcggcaatgaaaaacgcagaatgagcccggtgaggatggcggtcaaaatggtgccaaaaccgatcggcccacccatgccccatgccgcaaacaaaatggttaattccatgccgttccgcacccattgcacattccagccggttttttctgtaatcagcatcatcagtgaatcacgcggccccgcgccaaggcctgctgatacataaacaccgacgccgtaaccgatcagcaccacgccgagagagaagacgatgatcgagcctgtgtaggtcgagggggcaggcagaatgaaattgaaaaaatctataaatacaccaatgagcaccatattcaggagggccccaattttcggccaagctctcgtaaacaatgacgtgaatccgacgatgagcgctccaataatgatggaccactggccgacggtaagcccgaagtgctgaaacaggctgtaatgaaatgcatcccacggactaatgccgagtgcttttccttctatcgtcagggatacaccaaaagccaaaatgatcaaaccggcaaaataaaatgtccagcgcagaacaagttcttgcttcacgtgaggtcccttctttcgtaaaaatcagtcgattgtcattgtagcacatctgacagaagggcggaataggcgaaaggggctcaacaaaaaaacagggccgccgcaggcgccctgtttcagcgtgttggtaaacccttgcattcgttgtcaggcctgtgcttcggtgctcacgaatttaacattcgctgtgctccaatgctcgcccttcctagacttcaaaggttttcaatcacgctgaaaatcacaaaatcctaaaacgaatatcgttttaggattttgtcaataatctgaaacagggcgcgggcgccctgtttttcttattacagcgggttcaaaatccggttcaagaaccgctgtgtccgttcttcttttggtgcggagaaaatttgctccggcggtccttgctccacgataacgccgccgtcgatgaagatgacttcatccgcaacctcctgcgcgaacttgatttcgtgggtcacgacgaccatggtccagccttcattggccaagtccttgataaccttcagcacctctccgacaagctcgggatcaagcgctgaggtcggttcgtcaaacagcatgagctcaggctgaatcgccagtgcgcgggcgatgccgacgcgctgctgctgtccgccggaaagctggaacggatataaatccattttgtccttcaatccgactttatcaagaagctgaatcgcttcttttctgacttcctctttgttccgtttttgcacctgaacagggccctccatcacgttttcgagggctgtgcggtgcgggaacaggtgatacgcctgaaacaccattccggattttcggcgaagctttaggatatccgcctgtttcacctttttggagaaatcgatggagaaatcatcaaatgcaagctctccgcgattcgggatctccagagcgttcaggcagcggagcagcgtcgttttccctgaacctgaaggcccaagtatggcgatgacttttcctttttcaatcttcatatctatcttttttaaaatttcattttcaccgaatgatttgtttaatcctttaacggtaagcatactcggaacctccttatttggccacgtagcggtcaagacgccgttcgatgacatgctggacgagtgagagcaggaagcagataatccaataaataaaggctgcttcaatatagatcactaaaatttgatcaagattccgcgcgccgatttcctgggcttttctgaacagctcagcgaccagaatttgagaggcgagggatgtatctttaatcaggctgataaaggtattggataatggcgggatcgacacacgaaacgcctgcggcaaaatgacgcggaacagcgttttttgatgtgtcatgccaattgtgtagccggcttcccattgccctttcggcacggataaaatagatgctcgaatgatttcagatgcataggcgccgacgtttaatgaaaaggcgataactgcgcttggaaatggatctaatgtgacgttaaaggccgggaacagatagaaaatgatgaacaattgaacgagaagaggagtgccgcgtattgcggatacgtatacgctgaacacccatctcaaaggtctcactttcgacattctggcaagcgccgtaatcagcgccaggatcattccgaatataaaggaaagaatcgtaaggggaatcgtatagtagattccccctgaaagtatcggccagaatgactgctgcaccagatcccacgggatcgccgtgccaagcgtcaatgccggcagattatttagaaacatcttcgccgaaccattttttagaaattttagaaagagtcccgtcctctttcatttcttttaatgctttgttgacttgatcaacaacctcgccgcttcctttacggaacgtgaaatatgttgactgaggctcacctgtttcaaacgcgattttcacgtttttattgccagatgtttttaagtagttcaatacggcaagcttatcgttgtatgtcatatcgacgcggccttgctggatcatttgaagggcctgcgccataccttcaacgccttctactttagcgccggcatttgtagctaatttgttgtagttgcttgtcagtgattgagctgacgtttttccttttacatctgcttcagacttaatatcgttgttgtcttttttcgttacgacaacggctcttgatgttgtgtatttatctgagaaatcatattgattttcacgatctgtttttccgacttggttggcaacaacgtcaaaccgtttggaattcaggccggcaaacatactgtcccactgtgtttccttaaagtcgactttaagcccgaggcgttttgcgacttctgtgataacttcgacatcatagccagtcagtttatcagtgtctttgtcgtggtaagtgaacggctcatatgttccttccgttccgactgtgagcacaccttttttcttaattgaagcccaaagatcgccatctttggcattatcttttgactgattgtcatttcctgctccgcaagctgcaagagctgcaatacttacgaccatgaataaagccaataatgcttttttcatcttattccccacttttctggttgattttattgaaataaaaaaatagcttacaaatctaaaggataacttttttttagtatgagtcaagtaattggttttcataaggcaaaatcttttaaaataaatccaaaaattgctgtgccggtttaggcaaataactgtccgttctccacatgacagccggtgtcataatgaagggattattttcgatatgaacggtgcgaacgtgatttctcatatgaacgggaatcattgtgacgggcaaaatagacgcgccgaatccggatgacacgaggctgagcaaagttgcagagtcgtggcattcacaaacaatgcgcggctccaggttcaaacgatgaaattcattcatgacctgattataaacgccttttccgttgacaggccgcagcaggatcagcggaaatgaaggaatgtcctccatcttaatggtgtctccgcacggatatccggcttcatctgaaagcacgagcacacatggaatgtcatcaagctgtttgaattgtactgtgtcacttttgatcagtgttgtcgtgaccgccgcatcgatttgccggctttccagcagctccaacagtgtcgcgggttcattttcccaaatattaaaggtgagatgggggtatctctctttgatctgtgttactttttcaagcatcagagccgcgcaataaatcgttgatcccacggcaagtgtgccggctacttcctccttcagctcctgtacctcaatgactgcatcttcaaacctatgcagaatctcttttgctctttttagaaaaacagctccttcatatgtaagagtcatttgttttttcttgttacggtcaaacagaacaacaccaagttcgtcctccagctgtttgagctgcctgcttaaaggcggctgcgccatgtgaagctttttggctgcggacgtaattttctgttcttgggcaatggtaatgaagtatcgaagctggcgaatatccaaaagaaagcgcctccttatcataccttttaggtattaaatatagatttaatagatatttttcatatggatatatcaggagtatgattgaaatgaaagcagaattcaagcgtaaaggagggggcaaagtgaaactcgttgtcggaatgacaggggcaacaggggccattttcggggtcaggctgctacagtggctgaaggccgccggagtggaaacccatctcgttgtgtctccttgggcaaacgtcacgatcaaacacgaaacaggctataccttacaagaagtagaacaactggccacatacacttactcacataaggatcaggcggcagccatttcaagcgggtcgtttgataccgatggaatgattgttgcgccgtgcagcatgaagtctctcgcaagcattcgcaccggaatggcggataatctgctgacacgtgcggcggatgtcatgctcaaggagagaaaaaaactcgtcctcttaacgagagagacgcctttgaaccaaattcatctcgaaaatatgctagcgcttacgaaaatgggcaccatcattcttcctccgatgccggcattttataatcagccgagaagcttagaggaaatggttgaccatattgtttttagaacgttggaccaattcggcattcggcttcctgaagcgaagcgctggaatgggattgaaaaacaaaaaggaggagcttgatcatggcttatcaagatttcagagaatttctcgctgcccttgaaaaagaaggacagctgcttacagtgaatgaagaggtaaagccggaaccggatttaggggccgccgcacgggcagccagcaatcttggcgataaaagccctgcgctcttatttaacaacatttacggctatcataacgcgcgaattgcgatgaatgtcatcggctcttggccaaaccatgccatgatgctgggcatgccgaaagacacaccggtaaaagaacagttttttgaattcgcaaagcgttatgaccagtttccgatgccggtcaaacgtgaggaaacagcgccatttcatgaaaatgaaatcacagaagatatcaatttgttcgatatactgcctcttttcagaattaaccagggtgatggaggctactatttagacaaagcatgtgtcatttcccgtgatcttgaggaccctgacaacttcggcaaacaaaatgtcggcatttacagaatgcaggtcaaaggaaaagaccgtctcggcattcagcctgtcccgcagcacgatattgcaatccatctgcgccaagctgaagaacgcggcatcaatcttccggtcaccattgcgctcggctgtgagccggtcattacaacggcggcatcgactccgcttctctatgatcaatcagaatacgaaatggcaggcgcgattcaaggcgaaccatatcgcatcgtcaaatcaaagctgtctgatcttgatgttccgtggggcgctgaagtggtgcttgaaggtgagattattgccggagagcgcgaatatgaagggccgttcggtgaattcacaggccattattccggcggacgcagcatgccgattatcaaaattaaacgcgtctatcacagaaacaatccgatctttgaacatttatacttaggcatgccttggacagaatgcgattacatgatcggcattaacacatgcgtgccgctttatcagcagttaaaagaagcgtacccgaacgaaattgtggcagtgaacgccatgtacacacacggtttaatcgcgattgtttccacaaaaacccgctatggcgggtttgcgaaagcggtcggcatgcgcgcactcacaacgccgcacggactcggctactgcaaaatggtcattgtcgttgatgaggatgtcgatccattcaaccttccgcaggtcatgtgggcgctttcgaccaaaatgcatccgaaacacgatgcggtcatcattccggacttatctgtcctgccgcttgatccgggatccaatccatcaggaatcactcacaaaatgattcttgacgccactacaccggttgcgccggaaacaagaggccattattcacagccgcttgattcgccgctaacaacgaaagaatgggaacaaaaactaatggacttaatgaataaataaggaaaggatgttcgaaatgcatacatgtcctcgatgcgactcaaaaaagggagaagtcatgagcaaatcgcctgtagaaggcgcatgggaagtttatcagtgccaaacatgcttttttacatggagatcctgtgaaccggaaagcattacaaatcccgaaaaatacaatccagcgtttaaaattgatccaaaggaaacagaaacagcaattgaagttccggcggtgccggaacgaaaggcttgatccgcgtgaactgtatgtcagaccgcctctttgagctgcttgacgggagctgcctgaatgagaagcagcatgaggccttcgttctgcaaacagtatcagaggatggctggccgcatgccgctatgatcagtgcaggtgaaattatcgcgctgagccgaattgatatccgaatcgctctgtggaaaaacacaatgacttcggccaacatccttcgcacaggaaaagcacagttcacggcgtggtggaagggagcggcctattatgtaaagcttgaatgcgcgcctttaccgcctttgaatgatgctgaatatgatagagaccgtttttcctgccgcatcgtttcagtgaaggaggacgttgcgaaatacgctgatttgacttcaggtgtccgtatacagcttcacagccctgaagaggtgctgagcagatgggaaaagaccctggaagatttaaagcggtaatatcgatagcctgacgccatgcgtcaggctttttttatataatgaaaacaaaagggggcgtgagaaatggaacgtgcggggatcagtcactcggacggctttgatttagcttatcgaattgagggcgagggcgcacccatccttgtgatcgggagtgcggtttactatccgcgccttttttcctcagatatcaaacagaaatatcaatgggtctttgtcgaccataggggatttgctaagcctaagcgggagcttcgtgcggaggattcgaggcttgatgccgtcttggctgatatcgaaaggatgagaacatttcttcagcttgaggatgttactatcctgggacattccgggcacgcttttatggctttagagtatgccaggacatatcccaaacaagttcggaaggtggcgctctttaatactgcgcctgataacagtgaagaaagacagcgaaaaagcgaatcatttttcatggaaacagccagccttgagagaaagaaacgatttgaaaaagacatcgcgaatttgccgcaggacatcgacaaagatcctgaaaggcgcttcgtgcacatgtgtattcgcgctgaagcgaaaagcttttatcaagagcggccgcatgctgctgccttatgggacggtgtattcacgaatatgccgatcattgatgaattatggggcaatacatttgcccggattgatcttattcagcggttagctgatgttcgtatgccggtgtatattggattagggagatatgattatttggttgcgcccgttgcgctatgggatgcagttgacggtttatatccccatgtggataaggttatttttgaaaggagcggccatcagccgatgctggaagaaccggaagcctttgatcaaagcttcagcaaatggctggatcaataaaaaaacagcccgcagatcaaaatccgcgggctgtttctgattataagacccctttcatcgcgcgtttgataaccggcgagagcagcaggagaatgccgccaagaacgatagaaatcaaaccgatggtgccgaagtacattgtttcaggaattttatcaaacaatccggctacttgggcattgatcgcttgtgctgctgcgttcgtcagaaaccacatactcattgtctgtgcagagaaggcagctggtgccagtttcgttgtcacggataaaccgactggagacaggcacagctctccaagcacgacaagcaggaagctgagaacgagccaaagcgggcttacgagtgcttcttttccttgcatagcagggaataccataatgataaatgacaatccggctaaaataattccgattgagaatttaactggtgtagacggctggcgtttgccaagcttcatccagagccatgcgaatattggcgcaaaaatgacgacaaacaatggatttaatgattggaaccatgatgactgaagttcgaatccgcccaatgaaagtcttatgcgttcatcagcgtataccgcaagaatggtcgctccctgttcctgaatggcccagaacatgacagcaccgataaacaaaggaacgtaagcggcaagacgggatttttctgttttgtccgcttttttgcttgtaaacatgatgatgaaataaatcacaggaatcaaaataccgagaatacttacaaggtcgataaaacgattgatcgtcagcacgcctgtttgtacagagataatcactgcgatcgccacgatgataacaccgattccggtgccaatcgcagattttttagacagcggattcggcacattggaacctgcaagcccgaggtttttctttcttgtcaaagcaaaaacgataagtccgagaagcattccgaccgcggcagctccgaagccgagatgatagttgtacttctgtccgagtgttccgacaattaacggcgcaagtaaaccaccgaggttaatccccatgtagaaaatactgaaacctgagtcgcggcgcgggtcttctttcgtgtaaagatccccaaccacgcttgaaacgtttggttttaataagcctgttccgacaatgataagcaccatgctgatatagaatgcgatcgcgctgcccggataggcgagtgcaatgtggccgaacataatgaatatgccgccgtaaaacacggtgtttgcggtaccgaatacccggtcagcgagccatccgccaataatggtggacatgtatacgagtgatccgtaaatcgacataatggcaaccgcagtgcccttgtcaaagccgagccctccgtttaccgtctctgtatacaaatagtaaagtaagattgctctcattccatagtaagagaaacgctcccaaaattcggtgaaaaatagtgtaaatagtcctcgcgggtgaccaaagaaccctttttgcgggacgcttttaatgatactttcgttatcaatcgaagccatgtcagccaaaccctttctaaaaaaagtgtattataaaaatcatattcttatataatacttgtgtcaatataatttatactcatttcaaatagttccatattggaaaaattataaatacctaaaaatagtgatttcctcctaatttttaaactttttatcgtgagattttcttacacaactattcctttatatttttttaataaaattttagagaaatgtacaagcagatcgggcctttgtgagtaacatgatagtaatcatagagaaggaggctcgcaattggctgaattcatattaaatgcagcggatttcggtgttcctggagatggtaaaacggattcgacagaacggattaatcagtgcctcagtacagctgtatcgaaaggctatcatactgtctggtttccaaagggaacatatttaatagacgcaacgcttggcggagatcttaatcagaggtttcgaaacgcggggatcattgttcccggcaaccttgagattatgatggaccccgaatgtatcatgaaagtgatcccgaatagttcgtggggttattccgcattttatgtgggcaagcaagagaatataaccatttccgggggacaaattatcggcgaacgggatgagcatacgtatgcctcggcagggataaggtcaacccatgaatggggctttggcatatgtattgaaggatgctcgaatgttgtcattgatgatgtgaaaatttctgattttaccggcgatgggatcatagtcagcccaaggggattaaagaccaatcaagattatcgaacgtcagagcaaattatcatccgccgctgtgaggttcggcggtcgaggagaaataacatttccattaccggatgtgacatggtcacggtggaggaatgcttgattgaagatgccggaacggggaatggaacagcgccgaaattcggaattgacattgaaggatatggcgaaggtgatgttgattatgaggaaccgattaatgtatcaattcgcaataaccactttgttggaaacgtttcaagttctgtgaccaattttaacgggtatggcattttaatagaaggaaatcactctgacaatacaatcagctacggatatgggacgcaaacagtgatcaagggcaatattctgagacgccctgaagacgcggcggctgcgccaagagtcgggataaccggactcggtgtatcacaaggaaaagagaccagtgatgcagtgatcgctggcaacctcattaccggattttcaactggaattgatgtcagaggaaagagcgttcttgtgacgaacaacaaaatcagcaactttgaaaacacagggatattggtttatcagtcttccgatgtaaaggtagacggaaaccaaattcaaaacggactgtctgaaacaaggcgcagcatcggtcttcgcgcagtgctgtcagatgacatcgcttttctgaataactgtctcattcaagtcgttgacggtgtgaacgtttccggcggaaatatgatcattaaagataatctcctgagaaaattcagccggggcatttggattgctcaagggaacgcggtgattgaagggaatacactgaatcctgacgcgtttgaagcagtgccggaatcatattctgtttccgtcacaaacaatgccggcgccatcatcaaaaacaatacatttaaagagttcaaaaattaccccatttattgctccacaagtgcaaaaacctcaattatcggcaaccacttagagcgatccccgcttttggtcaccatctatatcagcgcaggtgtgcatgagatttttgataataccatttcagtcaacagaacagccgggaatccgattgtgatttatctcaatggctctgcaggctctatcatctctggaaacaccatcaataacctctccgcgggcactgcgacagctattcaaacaaacacgtcaaccaattccaaaatcatcggcaaccgcatttttaaagggaccatcaacaaacacagcagtgatacaatagacggcaatatgattgtctgaaaaaagcgcccccctttaggggttcttttttttcgatttatagatcacgtacatttctctcacaagtactaacacaaaaaataaaagcacgacccattccgcaaatgttgtcatcttaaagctggacatattgttataaacggcttttgttaaactgaacccttgaagcatgtccatcaacacagaaatagctaataaacaaattaatatgactccggtcacgcccaatatcttcatgcttcatcatcctccgcttttagtgtctatctttggcggagaagttataccgcatctaaccctaatgcataatctcaattttaaaaggaagaatatgagaaaacgacaaggaaaggtatttgtgtatgcctttattttctaagcgaaagaacaataccgattcaaaagacaagcagaatacagacgaaaggaatcaggaacagcagcaagaaaaagaaaggccggttctcatttctccaagtttggcaaagaatatagcggaaacgaaaaaggaagtcggaagcagctctgacgtcatcattcgcgagattaaaatcggggagcaggatcatgtccacctagctgttatctatattgctgggctggtcgataataacacgatccatgagtcgttaattgacccattggtacaggatgagtctatccagaatactcatgcgatccagcaaattcttgaaaaaacgctcccgctgggcggggtgaaagcggaaaagagctgggacaagcttttttccgagttaatgctcggcaatgcgctcatttttgctgatggccatgatgaagctttgatttgcagcactcaagggggagagcagcgctccatccaagagccgagcacccaggtgtcattccgcggcccgcgccaagggtttacagagtctctgcaaaccaatatttccatgatccggcgatacattaaaaatccgaatttatgggttgaaaaaatgaaaaaaggttctgttacgaatacggatatcgctctcatgtacattcaaggaatatgcgatgaaaaggtgctgaaagaagtgaagcagcgcctggaaaaaatagatattgacagtattttggaatctggatatattgagcagctgattgaagatgaaacctttacgacgtttccgactatgtatcatacagaacgccctgatgttgtagcgggtaatctgttagaaggaagattcgcgattattgtggacggaacaccgtttgtgcttattgccccggccttatttgtccagttttttcagtctgttgaggattattattcgcgttttgacattgcgacaagcataagaattcttcgtgttttagtctttttcatttcgcttgtggctccggctgtatacgtggcagccacgacgtttcatcaagaaatgataccgactcagctgttagtggtcattgcggcccagcgggaaattgtcccgtttccggctgttgtggaggcgctgacgatggaggttgcttttgagattctgagggaagcgggagtcaggctgccccgggttgtcggctcggcagtgtcaatcgttggcgcgctcgtaatcggccaggctgccgtacaggctggtatcgtctctccggcaatggtgattatcgtggcactcaccgcgattgcgagcttcgcaacaccggcgtttgcaatggcgatttcagcccggcttattcggtttatctttattattgcctcagctgttatgggtttttacgggctgattttagggatcattatgatgtttgtccacttatgcagtcttcgttcattcggcgttccatatatgtcgccgcttgcacccttttcttcacaaggcgtaaaggacgcgcttttccgggttccgtggtgggccgatgaaaaaaggccggaatcggtcagcaaggaagataaggtgcggcaggggcaagatcaacgcccagagccggccgcttcacgaggaatggtgaacaaagatttggaagaaggggatcagaatggtacgtaaatgtctattagccgttctcatgcttttgagcgtcattgtgctgcccggctgctgggataagcgggagctgacggatcttgcgattatctcggcgattggcatcgatcggacaaacgacagcaactacgtgctgcatcttcaaattatcaatccaggaaatgttgccggcggccttcagggaggcggtgctggagacaggccgcctgtatctgtctattcaattgaaggcgacaatttgacggaagcactcagaaaagcctccatgaaggtatcgcggcggctttattttgcccataccaacctggtcgtaatcagcgaaaagctggcgaaagaggaagggctggattttgtattagacaatcttgaccgggacacggaattcaggacaacggcgaccttcgtcgttgcccataaaacaaaagcagaaaatatcgtgaaaatcctgacgcctattgataaaattccgtcaaacaaagtcaataaaaccctcgatttcacggaggcgcaatacggtcgggtggtcaaaaccaatattcaggacgttttgaaaacacttgccagcgacacaagggcaccgattattccgggttatttgatgattggcgatgataaaaaaggagtcagcatggaaaacacgcaggcaactgacccgaaagccattcttcaggcagacggattggcgatttttgacaaggctgggtatttaaagtattggattgaagatgatgaaagcgtgggggcagtctggcttatgaataaggtccagcatacgtttattaatgctgattggggcaagacgaaggatgcggtcagcttgcaggttacccatcaagatacaaagctggtacctgatatgcggaacggacgtccgcacatccatgtgaaagtgacggttgaaggaattatagatgctgtcaaataccctttccaattgtctaatccgaaggtgctggccgctattgaaaaagcgctcaacaaagagcttgaaaaggaaatcagccatactgtgaaaaagatcaagaagaataagatagattttgtcggttttggtgacacgatatatagaaagtatccggagcagtgggagaaaatgaaggacacttgggacaaagaatatttgccggaactgcccatcgatgtgaaggccgagacgtatatcagaaggacgggattgcgaaacaatccgatcaaacaccagtttaaagatgattaggtctgaagaaaggggaagtgacagatggaaaaagccagaataagcataaggcagctgtttgtcatgattatcatttttgaactgggcagctccttattgattacaccgggatcaatggcgggcagggatgcttggatcgcagttctgttggggtgtgcggccggtttgtttcttttctatttgtatcaaggaatttatcaatgttaccccaattcttctccgaaagaatatatggatgatatgctgggaaccaagctgagctggctgttttcatttctctatatcttgtactttgcctatattgccgcaagggtcctgcgtgactttggagaaatgctgctgacatttgcttatcatgatacacctatcattattgtaaatggtttattagtgatagtaagcatatacgctgtaagaaaaggaatcgaagtgctcgcccgcgcggctgagctacttttcggagccatgtatttactgggcgcgatcggcctcgtgctgattgttgtctcaggttctatagacccgcataacttaaaaccggttttggcaaacggtatctctcctgtcctttactcagttttcactcagaccatgtacgttccgtttggcgaagtcgttttatttgtgatgattttccctaacctgaatgacagaaaagatgtgaaaaaaatggggatgattgccatagctattagcggattggttgtggcgctcaccgtggcgattaatatcagcgtgcttgatgttgatcttacactcagatcccagttcccgcttttaagtacgattcagacaatcaaggtcgaagaatttttagaccggctcgatgtcttttttatgctggcgctgatcatcggcggcttctttaaggttagcctctacttatatgccactgtggttgggacatctacgctctttaaggaaaagaacccctctcaattggcttatccgatgggattgggcatcttaatcctttctataacgatcgcgactaacttttcagagcacttgaacgaaggcttgaaagtggtgccgctgtatattcatttgccttttcaattattgtttccgctctttctgtttattgtggctgtttggaaaaagaaacgaagagagaagtcaaaagggacaggagcaaaaaaatgataaaaagagcggggggatgcagccgccgctctttttatgttcacttctatataaaagggggatatagggtgcgcccctgtctgcactggcagaggcgcgttttgttatacgactgcgacgttttccttcacagtaaagcttcctcttgaaagtctgatattgatgtctgacacttttgcaatttgttcatcgtgcgtcaccataatgacgcatttatcttccttgtgcgccagatcctgaaagagccgtacgatctcttttgatgtgtcctcatcaaggtttccggtcggttcatcggctacgataagatccgtgtcacagcagaaagcccttgtaattgatacccgctgctgttgtccgccgctcagtgtgagtactttttgccgggcttgtttttcgttgatgccaaccttctgcagcatgtcaagcgcatatgattcgttgttcttttctttagaacctgtgatttccatagcggttgtgacgttctgcaaagccgtcatatacgggagcaggttgtacgcctgaaagacgattgatacatattgatttctgaaattggttaagccgattttagaaaccgcttttccgccgtaaaggatgtttccttcttttggtgcgtcaagtccgcctgccagagacaggaaagtggttttccccgtccctgatgtgccgacgattgtgtagaatttgcctttttgaaagccgatgttaatatcctgaaacaatggctggcttttgtctttataccagtagccgacttgttgaaattctaataagctcataggttccgcctctttctattcctgttttgtcaatatcgttttcggatgaagccgcagtactgaaattgacggcagcaatgttgcaatgattgcgattaggatgccgatcccgccaagaataagcatgtcgttcatagaaaccgcgacgttcagtgaatcgataacgtccacgtttgatgaactgtggccgaacattttgccgcccatgccgccgccgggcatttgtccgcttgcggtttgcgttgaatcggttgatgaactgatttgctgggataaaagctgatttccaagctgatttgcgacgagatttcccgtcacagatgcaaggccgatagcgataacggccacaatcagaatctcagtcaagaactgtccaatcaatttccatcgtttttcaccgatggccattaacacgcccatttcgtatttgcgctccctgattgacatcatgacaatcaggccaagaatgacggcgcctgccactgatacaagatacaccacgtttttagagaaagaagccacattttcaatcggtccgaccatttgctggtaaagctgatcgtttgtattcagtgtgtacgtatcgaagtcaattgatgttttcttcgctgcttttacgaaagcatccatatttttcgcgtcgtccatatagtaaacagctgagtcaatcgtatttttatagtcgtcgcctttcagcgccgctgttgctgtgtaaggcgtataaagcttgttataaggatttaagaaagagaaattttgggcttggtcatcaccagaagatgttgttttataaataccgacaatcttcagctttaccgtcgtatcttcatctgttgctgattcaattgtgatcgaatcgccaacgctcaaatcattttcttccgctaatgtttcgttgatcactgttacttttttgccgacatctgattttgtaatcgcgcgtccgtcagtgatttttgaatccccgtcagagaaatcatcaactaatgctgtgctgatgacaccttcaatcgaaagatcagcttgaaccatttgcggtccgccttgtcctccgccttgactgtttttagcgtttgagcttgaactgctggagctggaatcacttgaactagagctttcaatcgcatcaaagtttcccgcgttggctgaagctgatgtggtgtaattgtagctcttcacatgatcaagcgctgcaagcttattcgcatcagacactttgatcggtgtggattcgaagctgcgcttttcaccgctgtcctgctgtttttccatttgcttttggcggtcaacctgaagtgtcacgcttccgccgagttcctgtctggccagttcgcttgatttttgtgctgccgactggatggtaaggcctgatagaacaaagacacatatgactgtaaacacaaataattgcaataacgtttttccctttttagccttcatattccaaaaggcccgtttgataaagttcatttatgttcctccgtataggtttttttatggataagaccgcctctggggcgcgcccgctgataaattaatagtagtccaaaggtatgaaaaaaatatgaacaatctatttctagttgatgaaataaaaactaacaattgtgaaacgcaaaaccttctgtttaaaatggtgctattatataaaaaagcatcaaaacaaccggaggatataatgaaaatattaatgatagaagataatgttagtgtatgtacgatgacggagatgttcttttttaaagaaggttttgaagcggaattcgttcatgacgggttagaagggtaccagcgttttacggaagaaaattgggatctgatcattttggatatcatgcttccatctatggacggcgtgaccatctgcagaaaaataagagagacaagcacggtgccgattatcatgctgactgccaaagacactgaatcagatcaggtcatcggttttgagatgggggcggacgattatgtcacaaagccgttcagcccgctgacattggttgcccgcatcaaagccgtcatcagaagatataaggcgacaggcaaagcggttattgatgaagatatgattgaaacggaatgctttaccattaataagaagacgagagaagtattattaaacggagagcctgtagaaaatctcacgccgaaggaattcgatctgctttattaccttgtccaaaatccgcggcaggtgttctccagagaacagctgcttgagcaggtatggggctatcaattttatggagatgagcgaacggttgacgttcatatcaaacggctgcggaaaaagcttgccagcgaggacaagcctttcctgtatactgtgtggggagtagggtataaatttgatgaagattaaatatttatatcagctgctgctaagccatatcagcattttgattttagcgtttgtcattatcatttctctgttttcccactttgtgaaggaatttgcctatcagaacaaagtagaggaattgacgtcatatgcggtgcagattgcaaatgaattccaagccggccaggtggacatgcgcaggctctatccttatcaggacatgttaagcacaagaaagacgcagtttatcatctttaatgaagagcagcagccctattttcttcctgaaggctttcatcacccaccaagggaacagctgaagaagtcagaatggaataagctaaaaaaagggcagactgtcatgatcagggcagatggccgttttgatgatgaagtgtcacttgtggcgcagcctatatttgttcagaacgaatttaaaggcgccgttctgctgatttctccgatcagcggtgttgaacagatggtcaatcaggtcaacctctatatgttttatgctgtgatcagcacgcttgtgattacgattctcgtgagttggcttctgtccaaattccatgtcaagcggattcaaaagctgagagaagcgacagataaagtggcttccggcgattatgacatccatttggaaaacagctacggggacgaaatcggcgttctggcgtctgactttaatatcatggcgaaaaaactaaagcagtcaagggatgaaatcgatcgccttgagaagcggagaaggcagtttatcgctgacgtgtcacatgaattaaaaacaccgctgacgacgatcaacggtttggttgaagggttgaacagccatacgattcctgaggataagaaggataaatgcttctcgctgatcagtgaggaaacgaagcgcatgctgcggctcgtaaaagaaaatctggattatgaaaaaatcagatcccagcaaattacattgaacaagctagacgttcctctgatcgaggtgtttgaaatcgtgaaagagcacttgcagcagcaggcggaagaaaaacaaaacaagctgatgatccaagtagaggatcacgtcatcgtacatgccgattatgaccggttcattcaaattctcgtcaacattacgaaaaacagcatccaatttacgaaaaacggtgacatttggctgcgcggaatggaaggttataaagagacgattattgaaattgaagacacgggtatcggcattccaaaagaggatattgagcatatttgggagcgattctataaagcagatatttcaagaacgaacacggcatacggtgaatacggactcggtctctcgatcgtcaggcagctcgttgaaatgcaccagggcacagtagaaatccagagtgaagaagggaaaggcacaaagttcataatccgccttcctttaacggcaaaacagcaatagcatacagggcggcgcatcaattgatgcagccgccttttttgcacaccgcttcggtttattgcgtgctcccgaaaacaaagattgcgtgtttttcgggttgggacggtctataaacatgataaaatatgacataaacagtttttgatgggagagggtgaaggaatgaagagcggggtaattccttcttcagcggtcggtcaaaaaattaacgagtggtacagatatatccggacattcagcgtgccggatgccgaagtgttaaaagctgaaatccagcaggaactgaaacacatgcagcatgattccaacttgctgctttattattcactaatggaattccggcaccagcttatgctggattatcttgagccgttagagaaattaaatatcgaagaccagccaagcctgtctgaattatcaagaaacattgacagcaatcaggcagatctcaaagggctgctcgactattacgtgaatttttttcgcgggatgtatgagtttgataagcgggaatttatttctgccattacatactataaacaggcggagaaaaagctctcctttgtcgcagaccatattgaacgggctgaattctattttaaaatcgcggaagcttattattatatgaagcaaacgtatttttcattgattaatataaaaaacgcctatgaaatttacgtggagcaggaaacctataatgtgagaatcattcagtgccatttcgtgttcggggtcaacctgatggatgaaagaaatttcgaacaagccgcacgccatttcaaattggcgctcaatatggcccaagcggaacaaaaagcccagctggtcggaagagcatactacaatctcggattatgctattacaatcaagaccttctaggccctgccattgattactttgaaaaagcggtctccacgtttgaaagcagcaggatcgtcaattctctcccgcaagcctattttttaatcaccctgatttattataaacagggaaaacatgataaagcttcggaatatcacaagcggggctatgaatatgctaaagaaacagacgatgcagactatgccgtaaaattcgagtttttgcaatccctatatcaggatcagcccaatgaagaaggaatcgaacgatgtttccaatacttaaaaaataaaaatatgtacgctgatatagaggatttagccctagaagtagcaaaatattactatgaacagaaatggtttaaactgtctgcttcctactttctacaagttgaagaggcaagaaaacaaatacaaaggagtgaaggtttgtatgaaattgaaatctaagttgtttgttatttgtttggccgcagccgcgatttttacagcggctggcgtttctgctaatgcggaagcactcgactttcatgtgacagaaagaggaatgacgtaagaacaagccccttctcattagcgagaaggggtttttcttttcaaaaaaacaccgcaagacatagtcttgcggtgccgccttcatggagattacgtttatttagtagcctcctacaaatgcagttcccacaatgatcaagaggataaataacacaacaatcaaagcgaaagaagttccgtaacctgacattttgtgcacctccttgcgagattgcttcagcaaatgctgcaaaactgtggcggacagggtcccgcagagacggtcagcagcttagaagccgccaacaaacgcagtccctacgataattaatagaataaacaatacaacgattaaagcgaaagaactgatgccgccgtaaccgccgccgttagagtatcctgacataaggtttcacctccctatgaaggatactataagatatgctgaaccgatccatttggcagggataatagtggacaagagaaaaaatgaagaattcggctatatgaaggtgatataaaaaaatagcgggcgctgccgcccgctatttatgtacgattaagagatcagcacgcccgcgaaaaattcctggtataacgcttgaacggcttttctttcttcggcttcttttacgccaaacatcatgctcacttcagaagacccctgattgatcatttcgatattcacctgtgcctctgataatgctttggcggctcttgccgttgtaccgacattgtggcgcatcgcttcccctacaaccataatcagggcgagatgatgctcgacgatgacttcatcggcatgcaaatcctcttcgatccgtttgatgacgctgcgttcagtggcggcatccatttgcccctgccgtaaaatgattgtcatgtcatcgattcccgatggaacatgctcatacgtcaaaccatgctcctccaggatttgaagggctctgcggccaaaaccgatttctctgttcatgagatacttgctgatataaatgctgcaaaaaccggtgtcgctggcaatgccgacgacaggcccgtttgtgttatcccgcttgctgacgacgcgggtgccttcggctgaggggttgttcgtatttttgatctgaacaggaatccccgctctgaatgccggaatgagcgcttcatcatgaaacactgaaaagcccgcgtaggacagctcccgcatctctctatatgtcagctcgctgatttcctttggattctcaacgaaggacggattgacagaatacacagcgtctacgtctgtaaagttttcgtacaaatcggcttgtagtccgttggcaagaatcgaaccggtaatatcagaaccgctccgtgagaatgtgatcacatcgccatccttgctgaatccgaaaaaaccgggaaaaatgatgagtccgtcacgttcccgaagacgatagaggttttgataggattcaggaagaacttgcgcgttgccgggttcatttgtcacaaagaggccggcatccttcgggtttacatatttcgctttgacgcctttataacggaagtaagcggcgatcagtttggcattgttatcctctccgctggccttgactgcgtcaaggtattgttcgggattgcttttgtctccttctaaaagcgtaaacagatcatctctgattttttcgataatgctttgccccagctgaagctcattggcgatgagagcgtaccgttccacaacagcttccgccagttcaggtgcgctgcctgttgccaaatattgttctgcacatgcgattaagagatcagtcactttcgtatcctcggcatagcgttttcccggagctgaaacgactacagctttccgtgccggatctgaggtaacgatgtgaaacaccttgtcaagctgggcgcctgaagcaagtgagctgcctccgaatttaacgaccttcatgtttacatctcctaatgtttaaaattttcacacaaatttagtatttattatctctctttcagtactgtaaatcaaggggggatttctttctcaggagaacatttgtatttttcacgaggaataatgttaggtttgctgaccgtatgcctgcgttataaagataaatatggtaaacagcctaacgttttgggatggaaaatggttagaatgattagtaaaattgataaatgactaggttaatatttttaaagaatattgactaaccctataaaaatggtaatatgtaaatgataatgataatcaattactatatggccatattgttttgagtccttgcggagtaggagatacgttctttttgctgtaaggatgtaaggaggcagcatgaagctacgttacttatttattctacttatcatattagcagtcacatctgtatttatcggtgtagaagatctgtcgccgcttgatctcttcgatttaagcaaacaagaggcgtcaacgctgtttgcaagccgtttgccgcgattgatcagcattgtcattgcgggattaagcatgagcatctgcggtttgattatgcagcagatcagcagaaataaattcgtgtcaccgacgacggcgggcacgatggattgggcgaggctcggcattttaatttccttgctgctgtttacatccgccagtcctttaatcaaaatgctggtcgcgtttgtctttgcccttgcaggaaattttctgtttatgaaaatccttgaaagaatcaagtttaacgacaccatctttattccgcttgtcggtttaatgctcgggaatatcgtcagttcaatcgcgacatttatcgcatataaatatgacttgatccagaatgtgtcatcatggctgcagggagacttctctttagtcgtgaaaggaagatacgagcttctttatctgagtattccgctcgtcatcattgcctatgtgtatgcggataaattcacattggccggtatgggtgaaagcttttctgtcaacctcggcctcaagtataaacgggttgtgaacatcgggctcattatcgtgtccctgatcacgtctcttgtcattttgactgtcggtatgctgccgtttctcggtttaatcatcccgaatattgtatcgatttacagaggagacaatctgaagagcagcctgccgcatactgcgctgttgggagcagtttttgtgctgttttgcgatatactgggcagaatcattatcttcccttatgaaatctcgattggcctgatggtcggaatcatcggcagcggcattttcctgtttatgctgttaaggagaaaagcctatgcgtaaccagatgaaaatagctttgctcgttggtttagccattgtatgtattggcttgtttttgttttatgacttaggcaattgggattacaccctgccgagacgaatcaaaaaagtcgctgccattgtgctgactgggggagcgattgcgttttcgaccatgatctttcaaacgattacgaacaaccgcatcctgacgccgagcattttgggccttgattctctctacatgctgattcagactggcattatctttttgttcggttctgcgaatatggtcatcatgaataaaaacatcaactttatcatctctgttctgctgatgatactgttttctcttgttttgtatcagatcatgttcaagggtgaggggagaaatatctttttccttctgcttatcggaatcgtgtttggcacgctgttcagcagcctgtcttcttttatgcagatgctgattgatccgaacgagttccaagttgtgcaggacaagatgtttgccagctttaacaatatcaatacggatttgttatggctcgcgttcatcatcttcctgctgacaggcgtttatgtctggcgttttacaaaatttttcgatgtgctgtcgctcggacgcgagcacgccgtgaatttgggcattgactacgacaaagtggtgaagcagatgctgatcgtggttgcgattttggtttctgtttcaacagcgctagtcgggccgattatgtttttaggccttctggtcgtcaacctggcgagagaattcctgaaaacatataagcattcatacttaatcgcaggctccgttttcatcagcatcattgcgctggtcggagggcagtttgtggttgagaaagtgtttaccttctcaacgacgctgagcgtcattattaattttgccggcgggatttattttatctacttgctgttaaaggagaataaatcatggtagaggtcagaaatgtaagcaaacaatatggcgggaaagttgttcttgaagagacgtcagtcacgattcaaaagggcaaaatcacctcgtttatcggtcctaacggcgccggcaaaagtacgctgctgtctatcatgagccgcctgatcaaaaaggattccggcgagatttacatagacggacaagagattggagcatgtgacagcaaagagcttgccaagaaaatgagcattttgaagcaggcgaaccaaatcaatatcaggctcacgatcaaagacctcgtcagttttggcaggtttccgtactcacagggccggctgacagaggaagactgggttcatatcaaccaggcgcttagctatatgaagctggaagacattcaagacaaatacttggatcagctgagcggcggacagtgccaaagggcatttatcgccatggtcattgcccaggacacagattatatctttctggatgaaccgctgaacaatctggatatgaaacactcagttgaaattatgaaactgctgaaacggctggtagaggagcttggaaaaacgatcgtgatcgtcattcacgatatcaattttgcttcagtctattctgactatatcgtcgctttgaaaaacggccgaatcgttaaagaaggaccgcctgaagaaatgatagaaacatcagtgcttgaggaaatctacgatatgaccatcccgattcagacgattgataatcaaagaataggtgtttatttttcttaatatatagaagaggtgaggagcatgaaaaagttcgcgttactattcatcgctttggtcactgccgttgtcatttctgcatgcggaaaccaaagcacaagcagcaaaggttctgatacaaagaaagaacaaatcacagtgaaacaccagctcgacaaaaacggcacaaaagtaccgaagaaccctaaaaaagttgtcgtatttgactttggaagcttagatacattagataaactaggacttgatgatatagtagcgggcctgccgaaacaagtccttcctaaatatctgtccaaattcaaggatgacaaatacgctgatgtcggcagcttaaaagagccagacttcgacaaagtggcagaattagatcctgatctgatcattatttcagcaagacaatctgagtcttacaaagaattctctaaaattgcgccgacgatttaccttggtgtagatacagcgaagtacatggaatcatttaaatcagacgctgaaacaatcggtaaaatctttgataaagaagacaaagtgaaagatgagctcgcaaacattgatcactcaatcgcagatgtaaagaaaaccgctgaaaagcttaacaaaaacggtctcgtcatcatggcgaacgatggaaaaatcagcgcgttcggccctaaatcaagatacggcctgatccatgacgtgttcggcgtgacaccggctgataaaaacatcaaagcgtctactcacggacaaagcgtttcttacgagtacatttcaaaaacaaacccggattacctgtttgtcattgaccgcggtacagcgatcggtgaaacatcatctactaaacaagtcgttgaaaatgattatgtgaagaatgtaaacgcagtgaaaaatgatcatgtcgtctaccttgattctgctacttggtacttatcaggaggcggtcttgagtctatggcacaaatgatcaaagaagtgaaagacggtttagaaaagtaaaaccaaaaagagcctccgctaaatagcggggctctttttttgttaatcagcgtgccggctgctgttcggcagggcgctgaggtttctttaatgtgaatgagagaaggaagccgacaagtgcaatgacggcagccactataaaagcggcgttcatgccgtgcagggcggcgtgcttcacatttgtcgtgcctgcatgtgccgcctggttgctcatcacggaaaccaatagtgcggttccgatcgagccgccgacttggcgaatcgtgttgttcatcgcagttccgtgcggaatcaagtggcgcggcagcgcattgattccggctgttgtcaccggcatcatgatcatggcggtgcctaagagacgaacggtgtataaaacgacaatccaagcgagtgacgtatggtcagtcagctgcataaacggcagagatgtcaggaagatgatgcagaaaccggcaatcgccagccctcttccgccgacacggtcaaaaattctgccgataatcggcgacataaagcccatcacaacggctcccggaaggagcataagccctgtatcaaaagctgtgacgtctctgacattttgtgtataaagcggcaggatggtttccgtaccgatcaataatgcaaagacgagggttcccagcagtgttgttaaactgaaaatgccaaacgtgaagacgcggaattccagcatcggtttttcaagcttcatttgtcttgtgataaacaagagcagcgcgatgacacccaccagcagtgaaatcaagacggttgaactggaccagccgtaagagccgacgcttgagaagccgtacagaaggccgccgaacccaaatgttgaaaggatgactgataaaatatcaatctgtgtttttcttaaagtcgtcacgtttttcatcaggatgctggcaagaatcaaatcaatcacagcaaacggaagaataatataaaacaatgatctccaagagaaagcttcgacagcccatccggaaagagtcggtccgatcgcaggcgcgaatgagatgaccaatccgaccatacccatagcctggccgcgtttttcaatcggaaagattgtcaggaatacagtctgcatgagcggcatcataatgccggctccggccgcttgaatgatacgcgctgtcagcagaaccgggaagttcggcgcgaacgctccgacgactgttccggcagtgaaaatgctcattgctgtgatgagcagcgcccggcttgtgaatttctcaattaaaaacgcggtaatcggaattaaaatcccgttggttaacataaatgatgtggtcagccattgtgcttggttggcatcgacattgaaatccctcatgatatggggaagtgcggtaatcaacaatgtctggttcaaaatcgccacaaacgctccggctaacaaaatgccgacaatgacagaacggttaaaaggtttttgttcaatacttgtgttcaatacatatcccttcttttctctaagtaattaacagtgtttttaacatggaaacgggctgtgttaaaacactggtttgttccagatagccaatcagtgatttgagtaaaaaagcgcggggttcttccttcttcgcttcttcctccagcatggcggctgcggatgtcagttcatctacgtcatagtccgcggcggacagggaagagatgcctttatgtaattccttcaggctttccgataataggactgatttatcctttggcttgtaggaggatgctgaatgaatataaagctcgatggcttcgggcggaagaagagactggcgggtttccctgtttttgataatctgattgagggtgctgatgataaactctgcgatcgggtcaagctcaagcggtttttcctcgattttgatcagcattaaaaactcacgcatcatgccgtgaagaatgataaccaaatcccacacaaacgggagaatggtttctccatacgcctggatcagcgaatcgcggtgccagcagataatcgtcgatctggtctgatggatatgctgtttgacccggtcattatgcagcttggggtttccgtaggtcagcatattgaaaaactgctgattccgcctgaagccctccagttccattttgaccttttgcgtcaaacgctcctccggtgtaagtgcggtattttcctgaagtcttgaggctgcggccaccatttgcttctggttaaatgacagcagctccaaaagcagatcttctttagattggaacagcttatatatcgaagcttttgacatcttacattcttctgcgatcgcctgcatggaaaccgacgtaaaatccttttccgaaaaaagctttcgcgcggctaacaagatatctgtttttttatcaagcatctcatggcttccttctttcttgaacattagaaaacccattggttcacagaaaaccaatgagtaactatgaaaaaattttaccaaataaacaaaatagaagtcaatggattttaaccgggtaaatgaaaggcctgccggaaaatccgacaggccgaataagagcttatttttcaactttaaatccttgtttttcaagcatttcacggatgtgcggatagtacaggcgctcatagtaggaagcgatgctctgtgaccaatttcttgtttcttttccgtttgtccgtttattcatgtattcagacatctgttcgtcgtatgcctgaatgtgagacgtcagctcatcctgattcaaataagtttcctgatgattgacagcttcctgcggcaagcgcggttttttcgctgaacggtcggcaggatgcccaatgacaaggccggataaagggaacacgtattttggaagctcaagcagttcgatcagctcttgagggtttccgcgaaccgcaccgatcggaactgtgccaagtccgagtgactcagccgctgctgttgctgtgccgagggcaataccagcgtctactgcgccgacaagaacagattccaatccatttgtgatttccattttgaaatcatgcagatcttcaagcgcaattttggcccgattgaaatctgcgcagaacagcaggaaaacaggagcttgatcgatccatggctggccgcctgccagctcggagattttctttttgcgctctttatcctggactgtgatcacagtcacctgctgtccgttgatagaagaaggggctgattgcaccgcttcaatgatttggtccaattgctcctgagctacaggctcatctgtgtagctgcgaatcgagcggtggtcttttaaagatttaatcacttcattcatatgggacaccctttctttactcgctaagctctgtgcggacaacatcaagaggggcgctcagcagttcttttccttttgcgacaaacccttggaaatgcgcagtttcgttatggaatttcattgccgcttcatctttccatttttcaagcatgacaaatgtattttcttcgcctactttttcgaataggtcgtattgcgcgttgccttcctcagctcttgaatgctgaacaagtgattgagcctcgctcaaaaattcctcgcgtttttctggttttactttgatgtaagcttgtaatacgatcatttaaatctcctccgttgttatgcgaatttattgttcgaatttcatcgaactaaatgtaacatgtattctaaatgaggtaaaggaaaaacccttatatagtaaaattgtcattctaattgttgtgtgatacatttgtgtcatgaacattccaaaccatccagaaacagaaacattgcagctgacaaaggttcttcatgcacttagtgatccgcttcgtttagagctcgtcaagcaattagctgaagcaaaagaaaaaacgtgcagcacctgtgcagatgtgcaggttgccaaatcgactttgtcgcatcattttaaagttttgagagaatcgggcatcgctcaagttcggatagaaggaaagcgccggtattattcgcttcgcgctgaagaccttgaaaaggcatttccgggcctgcttgaagccgtgctgaatgtagaccaggaccgctggtgaatcaatcccctgtaacggggatttttttatgtccgtaaaccgctttgaaaagccgctgcacacccgcctgaatatcttcttccttcagccgtgcaaagccgataatgagagcaggcctgcccgtttgccgcttgttttccttcaagttaaatcggctcattccgaatatttcaagctgcagcccggcagcatgtgacaggatgtcttgttcggtgcgcctggtatcaaattcggtaacaaaatgcagccccgcatttgccccttttacggtaacctctccgctgaactctgcttctaaagcggtgatcaggcgttctctcttttctttataatgctgcttcattttttttatatgcttctgatattcaccagactcgataaattcctgcagggtgagctgtgtgagtgatgagcaagtctgcagatcatagccccgctgtttgtatgccctcaacagctcaggcggcaacaccatatagctgatccgcaagccggggagaagggactttgaaaaggttcccatatagatgacattttgaaaacggtcgaggctttgcagcgccggaatactgtctacatcatatgtgaattcactatcataatcgtcctcaatgatatatcggcgcggctcctcggctgcccagttcagcagctgaattcttctggatacaggcataatcgttccggacggaaactgatgcgacggggtggtcaccagcacatctggctgctgtctggtgatttcagcaatcgacatgcctttttcatccagcatgatcgtctttacttgttttccggcattcttcaaaagctgatacatgcgcctgtagccaggctcctccatcgcatacacggcttccttgggtaaaagctcagtcaacagctgcatgagcacctgtgtgcctgcccctatgatcatttgttccggcctgcattttacacccctcgtcagggaaatgagcctcgtaatggccgctctcacttcatatatcccttgcggatgtgacatatcgccgagcgtgcggtatgagcgggaggccgctttttgctcgcagcggaaccagcttttgatcggaaaatggtctgtatcggaactcatgtgtgaaaacgatatccaatcgctctggtcgatgtgaatctcttttaggtcatccggcagtgcaaatggagggtgctcctcggcggaaaacatgtctagttcctccacgaagaaaccctttcgttcaatggcgtacaaatacccctcagccagcagctgctgataggctgaattcactgaatttacgctgaccttgagattttcagccagctcccgcttggagggaaccttcgagtgcggcagcagattgcggctgaggatttcttttttcagcttttgataaatttgctgatagatataatcggcttgttctgaacgatcgagtgtaatcgtgatatccatttgtattttctccttctgataccatcaaaaagttataattggtacttttcatcataccaaagagaagtcagaatgataagaaaataccgacagggggatattcacatgagtcaaacaacagcaagcatcacaactgcacaatggcagcaaaaacgggatcaatttgtgtcaaaaggtgtgagcaacggcaaccgcagtctggcggtcaaaggagaaggggccgagctgtacgatctggacggccggagatttattgattttgcaggcgccatcggcacgttaaatgtcggacactcgcatccgaaggtggttgaggctgtgaagcggcagacagaggagctgattcatcctggctttaatgtcatgatgtacccgacttatatcgagttagccgaaaaactgtgtggcattgcaccgggcagccatgagaaaaaagcgatttttcttaactcaggggcagaagcggtcgaaaacgctgtgaaaatcgccagaaagtatacaaagcgccaaggcgttgtctcgtttacacgcgggtttcacgggcgcacgaatatgacgatgagcatgacaagcaaggtaaaaccttataaattcggtttcgggccttttgcgccagaggtttatcaagcgccgttcccttattattatcagaagccggccggcatgagtgatgaaagctatgacgatatggtcattcaagcattcaatgatttctttatcgcttcagtggcgcctgaaacggtggcgtgtgtcgtgatggagccagtgcagggagaaggcgggtttattattccttcgaaacggttcgtacagcacgtcgcttcattctgcaaagaacacggcattgtttttgttgctgatgaaatccaaaccggctttgccagaactggcacttatttcgcaattgagcactttgatgtagtgcccgatctgatcacggtttctaaatcgcttgcggcaggcctgccattaagcggcgtgatcgggcgttcggaaatgcttgatgcggcagcgccaggggagctgggcggcacgtatgccggcagcccgctcggctgcgcggcggctttggcagtcttggatattatcgaagaagaaggactgaatgagcgatctgaagaaattggcaaaatcattgaagatagggcgtatgagtggaaaaaagaattcccgttcatcggtgacatccgcagactcggggcgatggccgcaatcgaaatcgtcaaggatccagacacgcgtgagcctgataaagcaaaagcagcagcgatcgcggcctatgcgaatcaaaacggattacttttgctgacagcgggaattaacggtaatatcatccgctttttgacaccgctcgtcatctcagacagccttttaaatgaagggctcagcatcttggaggcgggcctgcgagcttaatcattggaaagaaaacggctgggtctgctatcattttaagtaatcatgaaaagaaaggaatgttcaatatgccagatcaattaacggtctacaacccggctacgggcgaggagatcaaaacgattcctcagcaatcagccacagaggtagaagaagccattgaacgttcacatcaagcgtttaaaacgtggtctaaaacatcagcgaacgaaagagcgtctcttttgaaaaaatggtatgagctgattgttgaacataaagaagagcttgcagatttaattacaaaggaaaacggaaaaccataccaggaagcagtcggcgaggtactttacggcgcaggctatatcgaatggttcgcagaggaagcgaagcgtgtgtacggaagaacggtcccggccccgacaacgggtaaacgaattgttgtcacacgccagccggtcggccccgttgctgctatcacgccctggaatttcccgaatgcgatgattacacgcaaagcggcgcctgctcttgccgctggctgtacatttatcatcaagccggcgccggacacaccgctgtctgcttatgaactagcgcgcctcgcatatgaagcgggcattccgaaggatgttcttcaggttgtaatcggcgatggagaagaaatcggaaatgtgttcacaagcagtccgaaaatccgcaaaatcacgttcacaggctcaacacctgtagggaaaatccttatgaaaaacagcgcggacaccgtgaagcacgtctcaatggaactcggcggacacgccccgctgatcgtagatgaagatgcagacattgaccttgccgttgaacaggcgatggcgtccaaataccgaaacgccggccaaacctgcgtatgtgccaaccgcctgatcgttcatgaatccattaaagatgaatttgctgcgaaactgagcgagcaagtgtctaagctgaaagtcggaaatggacttgaggaaggcatcaatgtcggcccgatcatcaacaaacgaggcttcgaaaaaatcgtcagccaaatagatgatgcggttgaaaaaggcgcgaaggttattgctgggggcacatatgaccgaaacgatgacaaagggtgctactttgtgaatccgacagtgctcaccgatgtcgatacgtccatgaacatcatgcatgaggaaacattcggcccggtcgccccgatcgtcacgttttctgatattgatgaagcgattcagcttgccaacgatacaccgtatggcttggctgcttacttcttcacagaaaactaccgccgcggcatctatatttccgagaatttagagtatggcattatcggctggaatgacggcggaccgtcagcggttcaagcgccattcggcggaatgaaagaaagcggcatcggccgtgaaggcggttcggaaggtatcgagccgtaccttgaaacaaaatatttgtctatcggtttataaaagaatgcacgctcctgagagctgccggattttccggcagctctttttgtgttccggcgaataatcacaacaattccagccaaaataacagcaaatacattttgaaagaaggttccccaacaatggatttattattggctcttctcccggctttgttttgggggagcattgttctcttcaatgtgaaattaggcggcgggccgtacagccagacactgggaacgacgatcggggcactcattgtttctatcgttatttacttttttgttcagcccgttctgtcccttcgcatttttattgttggaatcgtatccggcttattttggtcacttggacaggccaaccagctgaaaagcattcaattgatgggcgtgtcgaaaacaatgccgatttccacaggaatgcagctcgtttccacctcgctgttcggtgtgatcgtgttccgcgaatggtcaacaccgattgcgattacgcttggcgttctcgctttgatctttatcattgtgggaatcattctcacgtccttggaagataagaatgataaaaaagagggcgagccaagcaatttgaaaaagggcattttgattctccttgtttcgactcttggttatttggtttatgtagtcgtggctagattattcaatgtgtccggctggtccgcgctgctgccacaggcaattggcatggtggtcggggggttagttttaacctatagacacaaaccctttaacaagtatgcgatcagaaatattctcccagggttaatctgggcaggcggaaatatgtttttgtttatttctcagccgcgagtcggcgttgcaacgagcttttccctttcacaaatgggaattgtcatttctacgctcggcggtattttcatcctgcgtgaaaagaaaacgaaacgccagctaatagcaattgcgatcgggattatcctgataattgccgccgccgtattcttaggaatcgccaaaacaaattcataacaaatggaggaggatgtatatgtatccggatttaaaaggaaaagtcgtcgctattacaggagctgcttcagggctcggaaaggcaatggccattcgcttcggcaaggagcaggcaaaagtggttatcaactattatagtaataaacaagatccaaacgaggtaaaagaagaggtcatcaaggcgggcggtgaagctgttgtcgtccaaggagatgtcacgaaagaggaagatgtaaaaaatatcgtgcaaacggcaatcaaggagttcggcacactcgatattatgattaataatgccggtcttgaaaatcctgtaccatctcacgaaatgccgcttaaggattgggataaagtcatcggcacgaacttaacgggtgcctttttaggaagccgtgaagcgattaaatatttcgtagaaaacgatatcaagggaaatgtcattaacatgtccagtgtgcacgaagtgattccttggccgttatttgtccactatgcggcaagtaaaggcgggataaagctgatgacagaaacattagcgttggaatacgcgccgaagggcattcgcgtcaataatattgggccaggtgcgatcaacacgccaatcaatgctgaaaaattcgctgaccctaaacagaaagctgatgtagaaagcatgattccaatgggctatatcggcgaaccggaggagatcgctgcagtagcagcctggcttgcttcgaaggaagccagctacgtcacaggcatcacgttatttgcggacggcggtatgacacaatatccttcattccaggcaggacgcggttaaacaaaaaaagcgacccagacatcacatctggatcgcttttttattacgcacgctttttcttaacaagtgctgctacagataaaataatggcagccgcagacagcacaatcgctgtaatgtctagagctgaagaacctgagttttcggaatcgtcttttgttttcgtggcgctgtgctcatctgtcacttgttttgcagacgtgatgtttgtaatggaatgaggtgtatcggcatcctcgtcacctgtccactcaacaatgctgccgtctttgtaatattggtatgcgtcccaagcagcttcctccgctttgtcagggtttttggcaacaaaggtaaactgctggaactgtccttcctgaatgcctccgtcagtcgcctcccatgtcacggacactgatttgtcatcatgtttttgagtggagaccttccagcccggaattggctcatattgctggaattcaacatccttcggcattttgaggactaccttcgttgtcggcagatttttctctgaaggaaccttcattgtatacgtttcccaagagcctgcagcagactcagccggttttacagaaacatgcgcgctggcaggggccgtaaagaataagagggagccgacaatagccggacatagtgtcaatgcgatttttttcaacaacgtaaacactccttaattggtctttgtaaacatgatattgatttcgttaaagtcgccggtcaggccgtggactttgatcttccagtttcctttttcattaatcgacaggttttgatcctggaagacgccttttgttttttcttttaatgtaaaagtgcttttgttttcgctgcctgacaggcctgttttataaacggttaacgtgatttgctggatgtttttcacgggatctccgttatggtcggtgacccgcagctcaaaaacattttttccgggctggtttgggctgatgctgagagaaacgctttgtccgttctcaatcgctttggtttggtagaacggttccggcgccggctcaggcgggcttggcaggcttgtaaacacggccgctgtgatcaatacagcgatgccgattgcccactccgctttcaacgttcggctgattcctgtgcggcgctgctttctggtaagcagaaaatgaatcgtgcctaagaccagcatgaaaacaaacagcccgcttttcactaaaagagcttgtccgtacgctgtatggaacagtgaatccattgaacgaatgatgaaaaatccattgagcaagcctgaaaacaaaatgacgccgactgcagtgagcgcccatggggagaaccgtctgaccgtctcccacgcgagcgttttgtcaggctgcctccattcttttgagagcagcaaaacgagtgccgctattccgccgacccagatggaagcggaagttaaatgaaggaaatccatcaaaatgccgaccgttttttcttcaacgacagcagcatgcccggtaaacgccttggcaagcaggagaccgaaaaagaaaatgagcggcgctgtccaatagccaaaggatgaaaagcggtttttccgtatcgcagggatgacagacagtgcgagcagcacgaacagcgcagcctgtatgatccaaatggagccgcctgctgtctcaaacagtgtttctctgatgtagcccgcctggaatgcgctgccccagccgccgcctgcgttcgcttttgtctgaatcggaagctgaagcaaaagcgccagacccagtgctgcgatcgagccggtcaggatacgtctcgtccgtttgacgagctgttctgatttccctttataccagaaaagatggaagaaaaccgttccgataaacagagataaggctgtatacagaatcgcgcgatctgctgctgttcccggattcagcgctgaatcggctgctttttggctgctgaatccgccatccgctttcccgatactgaacggaatgacgccggaaacaggatgtccatccgcggatacggcattccattccgctctgtacacatctttaggcagattcttcttcagcttcactgtcatgatgtgatgattatcttttttgatttcagtcttgtccgtatccacacggtcgccgtttgaattatagactttaatgtaatgaaacccttcttcaaccggttcattaaattcgatttccacctgcgcaggggcgctttttaattcgctgttttccccaggtgaagatttgacaatataggcgtgagcaaagcttgttttcggcaggaaaacaagaaaaagcagaaggatgatccaccatctgtttcgcttcatcactcagacaccaccttccgctgtatgtgttgtgttatttcttggtgcaggtgcagcgtttctttcggtcttgaagcatatcttccagcgcttggtcgaaagtgcggacggctccgccgaatcctttttgaaatcgttcggcatggtcaagtgtcgcaaacggaatggcctgcggctggcagcagtgcaggtttaattcagcatttacgacgaaataagccgaaccggcactgacggttgtctgtaacagaaaatctctgcaaatcaagtgtgaaacctcttccgttttatccgcgtaacgcaaaaacgcgcaatgtgcgcagcatagctgttcaatgtcttggtttaccgtaatcagctgaaccgaatgagcttgattgacgggcttcaagcaatagctgcacatatgatccgtttgaggtgttcgggcggggagcgtgatgccgccggccgttttaatgacctgatttgactgaaccagctgattgacatctctgtataccgtcatttccgaaacgccaaaccttgcgctgatgtcagaaattctgagcgcgccttcttctttcagccacttcagtatgtgttgctgtctattaatcggaagcattcatacaccctcttcattaagatctatttaagcgtagaggattttagagacagagacaagtaagctgatgataaaaaatgtgaaaatgtgttgaacaacaacaaaacgaaacagaagggactctggtataatagacatatggaatagaaagtgaggaataccctatgaaagaaacaccatgcccgaactgcggcaaacctttgacaggcgacatggtcagatcatcaaatgtgccttgtcaatttcgctgcggacactgccgggaacggctttatgaatataaagtatcagctccgattatgctggtatcattagcggccatcgtgctgctcatttatcttttgctgctcctccgcaatgcggcaggttcaatgctgccggctgtacagcacgtgccgatggctgtttttgcgcttgtgtgcgcctatcccgtttttattgtgagtgagcgaatgatcgcaaagtacgtgattcaaaatggcaacatcatttatagaggaaagagaaaaggctcctgatatcaggagcctttttatttttaaaaaattgtcacagtcatgtgccaaagtcctctttactttcaattgtatagggactgtaagcgttttaacatagagtcaaagggaagcatcattctctgaacatatttttttatcttacagcgacaaacaaaacagggagggtttatatatgcagcagcaagaacagcagcaaggcggcatgaaagtgaaagtgcaacgctttgggagttatttgagcggaatgatcatgccgaatatcggcgcgtttatcgcgtggggtatcattaccgcgctgtttattccggcaggatggtttccgaatgaacagctgaacacgctggtcagcccgatgattacgtatttattgccgcttttgatagcgtatacaggcggaaaaatgatctacgaccaccgcggcggagttgtcggagcgacagcggcaattggggtgattgtcggatcggatattccaatgtttttaggcgcaatgattatgggtccgcttggcggatacctcattaaacagactgataaattattcaaggataaagtcaaacaaggctttgaaatgctgatcaacaactttacggcagggattgtcggcgcggctttaacgattctcgcgttttacgccatcggcccggttgtcctgacgctaaataaattgctggcggctggtgtggaagtcattgtacacgctaatttactgccgatagccagtgtttttgtagaaccggcgaaagtgttgttcctcaacaacgccattaaccacggaatcttaagcccgatcggaatcgagcaagcatcccaaacaggaaaatcaattctgtttttagtagaagcaaaccctggaccggggctcggcattttgctggcgtacatgttctttggcaaaggatcttcaaaatcaacggctcccggtgcggcgatcatccatttcttcggagggattcacgagatttacttcccgtacattctgatgaaaccggccctgattctcgcagccattgccggcggagcaagcggactcttaacgtttacgatctttaatgccggacttgtcgcggcagcgtcaccgggaagcattatcgcattgatggcaatgacgccaagaggaggctatttcggggtattggcgggtgtattggtcgctgcagctgtatcgttcatcgtttcagcagtgatcctgaaatcctcaaaagctagtgaagaagacttggctgccgcaacagaaaaaatgcagtccatgaaggggaagaaaagccaagcagcagctgctttagaggcggaacaagccaaagcagaagaagcgtctgagctgtctcctgaaagcgtgaacaaaattatctttgcgtgtgatgcgggaatgggatcaagtgccatgggggcatccatcttaagaaacaaagtgaaaaaagcggagcttgacatcagtgtgaccaacacggccattaacaatctgccaagcgatgcggatattgtcatcacccacaaagatttaacagaccgcgcgaaagcaaagctgccgaacgcgacgcacatatcagtggataacttcttaaacagcccgaaatacgacgagctgattgaaaagctgaaaaagtaatcttatagaaagagagtgatactcatgcaagtactcgcaaaggaaaatattaaactcaatcaaacggtatcatcaaaagaagaggccatcaaattggcaggccagacgctgattgacaacggctacgtgacagaggattacattagcaaaatgtttgaacgtgaagaaacgtcttctacgtttatggggaatttcattgccattccacacggcacagaagaagcgaaaagcgaggtgcttcactctggaatttcaatcatacaaattccagagggcgttgagtacggagaaggaaacacggcaaaagtggtattcggcattgcgggtaaaaataatgagcatttagacattttgtctaatatcgccattatctgctcagaagaagaaaatattgaacgcctgatctccgctaaaagcgaagaagatttgatcgccattttcaacgaggtgaactgacatgatcgccttacatttcggtgcggggaatattgggagagggtttatcggcgcgctgcttcaccactccggctatgatgtggtgtttgcggatgtaaacgacacgatggtcagcctcctcaacgaaaaaaaagaatacacagtagaactggcagaagagggacattcatcagaggtcattggcccggtcagcgcgattaacagcggcagtcagcccgaagagctgtaccggctgatgaatgaggcggcgctcatcacaacagctgtcggcccgaatgtgctgaagctgattgctccatctatcgcagaaggtttaagacggagaaacactgcaaacacactgaatatcattgcctgcgaaaatatgattggcggcagcagcttcttaaagaaagagatatacagccatttaacggaagcagagcagaaatccgtcagtgaaacggtaggttttccgaattctgccgttgaccggatcgtcccgattcagcatcatgaagacccgctgaaagtatcggttgaaccatttttcgaatgggtcattgatgaatcaggctttaaagggaaaacaccagtcataaacggcgcactgtttgttgatgatttaacgccgtacatcgaacggaagctgtttacggtcaataccggacacgcggtcacagcgtatgtcggctatcagcgcggactcaaaacggtcaaagaagcaattgatcatccggaaatccgccgtgttgttcattcggcgctgcttgaaactggtgactatctcgtcaaatcgtatggctttaagcaaactgaacacgaacaatatatcaaaaaaatcatcggccgctttgaaaatcctttcatttcggacgatgtgacccgcgtagcgaggtcacctctcagaaaactgggagaaaatgataggcttgtaggcccggcaaagaaaataaaagagccgaatgcactggcggaaggaattgccgcagccctgcgcttcgatttcaccggtgaccctgaagcggttgaactgcaagcgctgattgaagaaaaaggatacagcggcgtacttcaagaggtgtgcggtattcagtcccatgaaccgttgcacgccatcattttaaagaaacttaatcaataaccgatcacccgtgacacaatgtcacgggctttttttactatctcgctatctagtataatagaaagcgcttacgaaaacagggggaggagaatgacgatgaaacaattcgagattgcggcaataccgggagacggagtaggaaaagaggttgtagcggctgctgagaaagtgcttcatacagcggctgaggtacacggaggtttgtcattctcattcacggcttttccatggagctgtgattattacttggagcacggcaaaatgatgcccgaagatggaatacatacgcttactcaatttgaagcggtttttttgggagccgtcggaaatccgaagctggttcccgatcatatatcgttatggggcctgctattgaaaatccggagggagcttgagctttccattaatatgagaccagccaaacaaatggcgggcattacgtcaccgcttctgcatccaaatgattttgacctcgtggtgattcgcgaaaacagtgaaggcgagtatagtgaagtcggcgggcgcattcacagaggcgatgatgaaatcgccatccagaatgccgtgtttacgagaaaagcgacagaacgtgtcatgcgctttgccttcgaattggcgaaaaaacggcgcagccatgtgacaagcgccacaaagtctaacggcatttatcacgcgatgccgttttgggatgaagtctttcagcagacagccgctgattatagcggaatcgaaacatcatctcagcatattgatgcgctggccgctttttttgtgacgcgtccggaaacgtttgatgtcattgtggcgagcaacttgttcggtgatattttaaccgacatcagctcaagcctgatgggaagcatcggcattgcgccttctgcgaacatcaatccatccggcaaatatccgtccatgtttgaaccggttcacggctcagctcctgacattgccggacagggccttgccaatccgatcggccagatttggacagcgaagctgatgctcgaccacttcggagaggaagaattgggggcgaaaattcttgatgtaatggagcaagtgactgccgacggcatcaaaacacgcgacattgggggacaaagcacaacggctgaggtcactgatgaaatctgttcgcgcttaagaaagctctgatgaatcaggccggtggcagatggctgccccggcctgtccatttccttacgaaaatttccacgaaagtctaaccaagcagatccaaatgctgtataataatttggaattcttaggaaagcatcgggtgaaggaagttgaatgcaaaaacaatcacgttaaagaaaaaaagaaaaatcaaaacgatcgttgtactcagtatcattatgatcgcagctctcatttttacgattagattggtgttttacaagccttttcttattgaaggatcatcaatggccccaacgcttaaagactcagaaagaattctggttgataaagcagtcaaatggactggcgggtttcacagaggagacatcatagtcattcatgacaaaaagagcggccgctcatttgtcaaacgtttaatcggtttgcctggtgacagcattaaaatgaaaaatgatcagctatacataaatgataaaaaggtggaagaaccatacttaaaggaatataaacaggaggtcaaagagtcgggtgtaaccttaacgggtgacttcgaagttgaggttccttccggtaaatattttgtgatgggagataaccgtctcaattcactggatagcagaaacggattgggcatgccttctgaagacgatattatcggtactgaatctctcgtcttttatccattcggtgagatgagacaggcaaaataaaatgcaatgcaaaaagaacatggaacatgacggcaccgataataaagcgccgtgcacgtttaaaaaaatgatgatgaaacggtgcggagccggctttccgccccgttttttatgatagaaagcgttttgaagaaaagggccctgttgaaataaacagaatcaggattggcgaagccgtgaagcgcatcgaattggtaaatctcaagatgggtatgctgtttttcccgcagttttttgataagaagcgctacgtcaaacgacggctcataattagggaaaaacaataggaccgggcaggctggcacgtgatgaagagagtcgcgtatccgggaaccgtaataacaaaccgatccgctcacctcaggcatactgctgcatttccatgcgatagtagcccccacgctgaatccaatcacaaagatgtgccgtccggcgttttgcctgatcacattctggatgatggtttctcccgttttcagccgttcgtgttttgtaaattgttcgtatgccgttttttcttcttgcagtgtgtagacttcattctcgccgagcaggttgggcgtcaacacatcatatccagccattttgatcagccggcccatctttttcatatggctgtttacaccgtatatttcgtgtacgagaatgacaagcggttttggggacataacggcctccttttgtgttttttccattatatcctatcgtttcactttaggctgagatataatggtcaaaaaaggagatataaaatgaactcattatctttgcctcaccgctatccatttttgtttattgatggcgtgacggatagcgagcccggcaaacatgcggcagcttataagctgattagtgagaacgactggtttatcactgatacgcaaacagaaatgccgttttcacttgtgattgaagcgcttgcgcaaaccgcggcttttacaggaattacagatgagaacagcttgggattattgtcttcggtgaagaaagcggaaaagctgggagaagctgtgcctggtgaccggcttgatcttacgtttgaagtcacgcgcaatcggcgcgggtttgtgttcggacatgccaaggcgtcagttggagagcagcctgttgctgaagctgaaatcggcatctatattgaaaaatgaaaaaaacccttcacaacattttgtgaggggttctattttgtgtcgtaatcccgttcgctttgagagttatctctttgctggcgtttgtgtttttcatcattcatattttccttcagctcttcattaggaatcggatcggttaagtcgttgtgctcggggttttcatttggtttgttttgctgttttttttctgtcatgtttgatcacctcaccgtttgttttcctcttatccgttctcctcaaacataggaaaccgcttttttgtcccgctgggtataatgtattagaatagagagaagcacaacaaaaagataaagagaggtacatatatgtctgttcaaagagaagatgtagatatcaagctgatcgcaattgatatggatggtacactgctgaacgacgagcagctgatctcggatgaaaaccgcaaagccattcgtgaagcggaggataaaggtgtgtatgtggtgatcagcacgggccggacgcttatgacgtgccgggaactggcggaatcgctaaagctgtcatcctttctaatcacggcaaacggcagtgaaatttgggattcgaattttaatttggtggaacggaagctgcttcatacggaccatattcaaatgatgtgggatttgcggaataagcacaacactaatttctgggcttctacggtgaataaagtatggagaggcgagtttccggaaaacattacggatcatgaatggctcaaattcggctttgacatcgaggatgacgatatccgaaacgaagtgcttgaggagctgagaaaaaacaaagagctcgaaatcacaaattcaagtccgacaaacattgaagtcaacgcgcttggcatcaacaaagctgcagcccttgccaaggttacggaaaaactcggctttacaatggagaatgtgatggcgatgggcgacagccttaatgacattgcgatgatcaaagaagcgggtcttggcgtcgcaatgggcaatgcgcaagacatcgtaaaagaaacggctgattatatcacggatacaaatattgaggatggtgtcgctaaagcgattcgccattgggtactataaaaaaagagagtcctaagatggactctcttttttagtttggcaggttttattctgggaccatggtaggttttctgacaaaagtatttcacaaactgatatgattcacttataatgaaataaagttcaaaaattcggaatagtcgttccgaatttcgggacaataaatgacataaagcatatcgtttgctttggcaggagggattctgtgtttcagattgatttaaactgtgatttaggagaaagcttcggagcctacaagataggccttgaccaagatattttagagtgtgtgacatcagcgaatatcgcatgcggatttcatgcaggagatcctagtgttatgcgaaaaaccgtcgcgcttgcagcagaaagaggcgtgaaaatgggtgcgcatccgggcttgccggatttactcggttttgggcgccgcaatatggcgatttctcctgaggaagcgtatgatcttgtcgtttatcaaattggcgcgctctctggctttctaaaagcagagggacttcacatgcagcacgtcaagccgcatggcgctttatacaatatggcggcagtcgatcaaaaactgtcggatgctatcgcgaaagctgtctataaggttgatcccggcctgattcttttcggtcttgctgagagcgagcttgtaaaagcgggagaacggatcggacttcagaccgcaaatgaagtgttcgccgacagaacataccaatcggacggcacgctgacaccgcgctcccagccggacgcactcattgaaagtgatgatgccgccgtcacccaggtcatcaaaatggtgaaagaaggggcggtcaaatctcagcaaggacatgatgtgtcattaaaagcagatacagtctgcattcatggagatggagcccatgcgctgacatttgcgcaaaaaatcagaaaacagctcaaagcggctggaattgaagtgacagctatttcagaacagaggtcaacataaaggaggaacaatagatggagcagcagaaaaagacagcaggaaaaaaagcgggcagctggtcattgctgatgggcgccgcctttttaatggcgacatcagcaatcggaccgggtttcctcacccaaaccgcaacattcacaaacacactcgcagcaagcttcggttttgtcatcttaatctctattattttagatattttcgcccaaaccaatgtgtggcgcatcatcgcagtttctggaaaacgaggtcaggaaattgcgaatatggtgcttcccggactgggatatttcatcgccattctcgtcgtgcttggcggactagcttttaatattgggaatatcggaggggccgggctgggacttcaggtgctgttcggcattacacctgaaacaggcgctttaatcagtgccgttatcgccattttgatttttgtcatcaaggaagcaggaaaagcgatggaccgttttacgcaaatcgcggggttcgtgatgattattttaacggtctacgttgcggcgacgacagctcctccagtcggacaggcagtcgcaaatacattcgtcccggaacacatcagcatatttgccattgtcaccctagtgggcggaaccgtcggcggttatatcacatttgccgggggacaccgtttgcttgatgccggaattaaagggaaggaatccattccgcaggtgacaaaaagctcggttgtcggcattttaattacatctgtcatgcgtatcgctctttttcttgcggttctaggcgttgtatcgaaaggcctgcacatcgatgaaagcaacccggcggcttctgtcttcaagctggctgctggaaatgtcggttataaaattttcggattgatcatgtggtctgcggcgattacgtctgttattggagcagcctatacatctgtttcatttttcaagaccttttctccaaaaattgaaaagaattcacgcggtattattatcggatttattgtggtttctacgttagcttttgtcacaatcggccagcctgcgaagatcctcgtccttgtcggttcactgaacggcttaattctgccgattgcgctcggaacgctgcttgttgccgcctacaagaaaaacattgtcggtgattataagcatccgctttggctgacaagcacaggcgcgcttgtagtgattgtaatggcagttatgggaatctacacgttaattacacaacttcctcaattgtggagctgatataagtggagcaattaaacaaaatggcgccaaaggatgtacgcgccctgatacgagaggggaaaataaacgggccgaccgcaggcatgtctggcggctacgcccaagcgaatcttgtggttttgaaaaaggaccttgcttttgattttctgctgttttgccagcgaaatcaaaagccctgccccgtgctggatgtgactgaagcaggttcgcctgtgccgtctctggctgcgccggatgctgatatcagaacggactttccgaaataccgtatttacaggcacggtatcctaacggaagaagtatctgatattacgccatactgggaggacgattttgtcggctttctgatcggatgcagtttctcctttgaacaggcactaatcaataatgggatagctgtccggcatattgatgaggggacaaacgtctcgatgtataaaacgaatatcgattgtgttccggcgggggcgtttcacggacagatggttgtcagcatgaggccggttcctgaacggctggctgtacgtgctgcacaagtgacctcgcgttttccggctgtgcacggagggccgatccatatcggcaatccgggagcaatcgggattcgcgatctcgggaaaccggatttcggagatgccgttcccattcgtgacggcgaggttcctgttttttgggcatgcggggtgaccccgcaagccgtggctatgaatgtaaagcctgaaatggtcatcacacatgcgccggggcatatgctcatcacagatattcgagacgagtcgcttgcggtgctgtagcctctcgtcatcctgatgaacgagaaataaaagaggtgagaaagatgactgtacgatatcaaatcgaacagctcggtgattctgcaatgatgatccgattcggagaagaaatcaatgaacaggtcaacggcattgtccatgccgcggccgcttatatagaagaacagccatttccgggattcattgaatgtatcccggcttttacaagtctaaccgtattttatgatatgtatgaagtgtacaagcatttgcctcaaggcataagctcaccttttgagagtgtcaagcgcgatgtcgaagagcggctggcagaaatagccgaagactatgaggtcaaccgccgtattgtagaaattcccgtttgctatggcggtgaattcggtccggatttagaagaggtggcgaagatcaatcaactgtcaccggaggaagtaatcgacattcatacaaacggtgaatatgtggtgtatatgcttggcttcgcgcccggttttccttttctaggcgggatgtcaaaacgcattgcagctccgagaaaatcatcgccaagaccgtcgattcccgcaggttcggtcggtattgcgggattgcagacaggcgtttatccgatttcaacgccgggcggctggcagctgatcggcaaaacgccgctggctcttttccggccgcaggaaaacccgccgacattgctgcgggcgggagatattgtgaaattcgttcgcatctcagaaaaagactatcacgcctataaggaggagtccaattgagcatgaaagtattaaagcccggactgctcacaacggttcaggatataggcagaacgggttaccaaaaatacggcgttctggccagcggcgctatggacacggtttcactgcgcattgccaatctgttgataggaaacggcgaaaatgaagcaggtctcgaaataacgatgatggggcccggtccgtcgtttcatttttcaaaacagacactgattgctgtgacaggggcggacttcacgctgcgtattaatgacgaggaagcgcctttatggaagcctgtgctcatcaaggaaaacagcacggtcagctttggcccctgcaaactcggcagccgtgcttatttggcggcagctggcggcattgaggtgcctgccgtcatggaaagtaaaagcacatacgtcagaggaagcattggcggacttcatggcagagcgcttcaaaaagaagatgaactgaacattggagagatgtcagctctttcgcaaaccatcctttcccgcttaagttcgcagcttggaaaacagggatttgcagcaccgaagtggtcagtcagccgcggcagatttctgccattgaagaagaatcccgtcattcgggtgctggaaggaaagcaatttgcctttttcacagaagaatcaaaaacgcgtttttatgaagaagcatttcgtgtcacgccgcagtccgaccgtatgggctacaggctcaaaggagaaccgctcgaactgaaggccccgcttgagatggtgtcggaagcggtttcattcggaacagttcaggtgccgcctgacggcaacccgattatcctgcttgcagaccggcagacgactggcggctatccgaggatcgcgcacatcatatccgctgatcttccgattgtttcccaaatcatgccgggcgagcacgttcagtttgagcctgtgtccctccaggaggcagaagcgcttgcggtagaacgggaacagcatataaaagaactgaaaacgagaatgaagatggaatggctgacatagcaaaggggatgaatgatgcagaataaaaataaaaccgtagtcaaatctatggcgctgcttaatttgtttttgcataaaccaagcctaaccttaagtgaactggtgtcgctgacgggaatgccgaagacctctgttcaccggatggtcagctccttggaggaaatggggttcctcagtagggatgcgtccggcgcttattcgctgggattggtgtttttggaattcggacagcttgtcgctgacaggctggatatcagaaaaatagcgaaaccggtgatggaagagctgtgccgggaagtggatgaggccgtgcagttgatcatgagggacggcaatgaagcgatatacgttgagaaaatagaagggacacagactgtgcggctgtatacggcgatcggcaggcgttcccccctatacgcgggagcgtgcgccagaagcattctgtcctttcttccccgtgaagaaatcgaagcatacatcaaacaaaccgagctcatttcgattggctccggaacgattaccgatcccgaaaaactgcttcaggagattgatgcctctgtgcaaaatggctatactgtcagctattcagagctcgaaaactatacggcggcgatcggcgccccgatctttaaccatgagcgccaggtggcagccggcattagcattgcaggctttgaagcgagatttacagaagacaggctgccctatttaacagaaaaggtgaaggacgccgctttacagatttcaagaaaaataggatatacataagtagccaatcttttctctgctgcgtacattaacgtatcgacgttcaagagtggaggaaagaacatggtgcttcgatatacagctctgggcgattccttgacgacagggagaggctccgggctgttttcacccggcttcgtccagcgttttggggacatgatggaagctgacttgaaaacaagaacggcaataaacatatttgccagatcaggcctgaatacagaagagattttgggactcctgtcatatccctatgtgcaaaaatgtattcgagatgctgatatgataacgatcacagggtgcggaaacgatctcatcgattcggtcttagcctaccaaacctctaaggatgaaacgattttcagccgtgtatccgcccattgccatgagaattttgaaaagatgattgccaaagtcgccgagattaaaggagaaaatccttccccgtacgccattcgtgtgttcaacttatacaatccgtttcccgaaattgatatcgccggcaaatggatcacttcgtttaattcacatttagaaacacttgcatcagcaccccatgtcaaaatcgcggatgcctatagcatcttcaaaggcaaagaacaggaatatctgtcctttgacggtgtccatccgaacagcaaaggctatcaagcgatggctgaagccgttcacaagctaggctataaagaattatcagtttcatagaaaacgcgcctcatgacaggcgcgttttttatgtgtgatcgaaatattaaaagaaacttaaaattctctgtcttctgttctacagacaaacaaagtgcgctagaataatggagggcgtaggcaaatatagccataacgttcaatatttcgtatataaggaaggatggtccttttgtttcggatttttaaaatgtcttttgcggttatcattattatactggcgcttattgcttttaactatacggaacacacctctgttatccaatcggtcatgctcgtctttcttggtgcggtcatgtttatgcaggggcttgaagaacgcaaaaaagaaaatgacggctcaggcgcttttaatatttataccgccgtttttgtatggtctgtctcccttatcggttttacacttcatattatataaatctattacacatcctgaaaatgctcgaccgtcgggaacggggtatagaaccgatgaagcaaggctttccactcttgatactctgaagaaccgcgaaagccttccgtatggtcctcaagtgtttcccactccacaagaagcagatatttatgcgtttcctccatgcattttgataacgagtgcgtgatatagcccttcatgccggaaataatcggcgccgcttgccggaatgcatcctcaaactcttgttcaaggccttctttaatgtgaagcattgctgcctccctgaccatgctatcccttctttctgtcttttcgaatagtctacagcaaacgataggagatttctgcaaaatcggtgaacttttccttcattttcaaaaaaatcttgcacgcaccaattcaattaagagaaaataacaagtggaaggcaggggaaagtcatgttaaaaaagtgtattctactagtatttctatgcgtcggattgattgggttaatcggatgctccaaaacagattcaccagaggatcgcatggaagcattcgtgaaacagtggaacgatcagcaattcgatgacatgtatcaaagcctgactaaagatgtcaaaaaagaaatctccaaaaaagatttcgtcaacaggtataaagccatctatgagcaggccggcgtaaaaaatttgaaagtcactgcgggagaagtagataaggacgatcaagacaacaagacaatgaaacatatcccgtataaagtcagcatgaacacaaatgccggcaaagtcagcttcaagaatactgctgtgctgaaattagaaaaaacagatgacgaggagtcatggaatatagattgggacccatcgtttattttcaagcagctggctgacgacaaaaccgtgcaaattatgagcattgaaccgaaacgaggccaaatttacgataaaaatggaaaaggtttagctgtcaatacagatgttccggaaattggaattgttcccggagagcttggcgataaaaaagagaaagttataaaagaactcgccaaaaaacttgatttgactgaagacgacatcaagaaaaagctggatcaaggctgggtaaaagacgattcgtttgtgccgctcaaaaaggtcaagcctgaccaggagaaattagtttctgaagcgacgtcattacaaggcgtaacaagaacgaatgtcagctcccgctactatccgtatggcgaaaagacagcccatttgacaggctatgtccgcgccattacagcggaagaactgaagaaaaagaaagaaggaacgtacagcgatacgtctaacatcggtatcgccggacttgaaaatgtgtatgaaggcaagctaagaggcacaactggctggaaaatctacgtgccgcaaaccggggaagtcatcgctgaaaagaaagcaaaggacggcgaggatcttcacctcacaattgatatcaaaacgcaaacgaagctgtatgatgaactgaaggatgacagcggggcggcagtcgcgctgcagccgaagacaggcgaaacactcgcccttgtcagcgcgccttcctacgatccaaacggatttattttcggctggagcgataaggaatggaaaaagctaaacaaagataaaaacaacccgttttcagcgaaattcaataagacatacgcgccaggttctaccattaaaccgattgcggctgctattggaatcaaaaacggcacccttaaagccgatgagaagaaaacaatcaaaggcaaggagtggcaaaaagattcgagctggggcggctattcagtgacacgtgtgtctgagagacttcaacaagtcgatttggaaaacgcccttattacgtcagacaatatttattttgcccagaatgcgcttgatatgggagcggacaccttcacaaaaggcttgaagacattcggtttttcagaggacgttccgtacgaattcccgatccagaaatcgtctattgcaaatgacaagcttgattcagacattttgcttgcggatacaggctacggacaagggcaaatgcaaatgtctccgcttcacttggcaactgcttacacgccatttgttgacaatggagaccttgtcaaaccgacgctgatcaaaaaagattcacaaacagctgatgtttggcacaagcaagtggtcacgaaggaaggagcggcagacattacaaaaggtctgaaaggcgttgtggaagatgagcgcggatcagcgtatcagcctgtcgtgaaaggaatcacagtggctggaaaaacaggaacagccgagctgaaaacatcaaaagatgataaagacggcacggaaaatggctggtttgtcggctacgattacaaaaacaaagacctgcttgtcgccatgatgatccaaaatgtgcaggaccgcggcggcagccactatgtcgttgagaaagcgaaaaagcaatttcaatcgaattaaaatgtctttttaaaaggagcgaaaggaaaaagaggatctgaggccgaatgaactagtaaggggcaaaacccggtttatacaaagaaaagagggattttgcatgcagcgtattcaattggcggaggatcttcaattttcaagagtcatacacgggctttggcggctgaatgaatggaactattcagatgctgaacttctaagcctcattgaatggtgtatcgatcacggcatcacgacctttgatcatgcggatatttatggaggctatacgtgcgaaaagctgtttggaaacgcccttgccctttcgcctggattaagagaaaacatagagttggtcacaaaatgcggtatcgttcttgaatcgcctgaacggcccgctcacagatcgcatcattataacacaagcaaatcgcatattttggcatccgttgagcaatcgcttatgaaccttaggacggattatatcgatatgcttttgattcacagaccggacccgctcatggatccggagggggtagcagaggcgtttcaggccttgaaatgctctggcaaggtcaggtactttggcgtttcaaattttaaagatcaccagtatcggatgctggaatcatatttgcctgagaagctcgtaaccaaccagattgagctttccgcatacgaattagaaaatatgctcgacggcactttgaacctgtgccaggaaaaacgtattccgccgatggcttggtcgcctctggcaggcggcaaagttttcactggtgacacggaaaaagaccggcgtgtccgcacggcgcttgaatccgttcaagcagagattggcgccgcttcattggacgaggtgatgtacgcatggctgtatacgcatccggccgacatcatgccgattgtcggaagcggaaagcgcgagcggatttccgccgcgataaatgcgttgtcatacaagcttgaccaggatcaatggttccgcatttttacagccgtacagggttacgatattccataaaaagcatcagcttaccagctgatgctttttcaatattgtcacaccgcatagtgccaaattaccatttataagtgattgattctttcttgaaagcgttttatattaaaaggaaacctctctatatcctctactgcatctccttgcgacttcatccgcacatcaagattgtctaggaggtcttttttatgtatatgactgccagagaacaaaagctgttaaagcacttattattacaaaacagatatataaccgtaactgagcttgctgagctgatgcaagtcagcacgagaaccattcacagggaactcaaatcaattaaaccgctgatggaaaccgttgggcttacgttagataaacagcccggtaaaggtttgaaagcagtgggaagtcccgaagataaacaaaagctgcttactgatttatcatatgaacagcatgaatacagcgccgacgaacggaaactgctcattctttgttcgttattagagtctcaggagcccgtcaaactgtacacgcttgctcatgatctccaggtgacgaatgccacggtcagctatgacttagatgagctcgagaagtggatttctcccttcggactgacactgatccgcaaaagaggttttggcatccagcttatagggccggagaatgcgaaacggaaaattgtcggcaacttgattgtgaaccgtctcgacatccaaatgtttttggaagcggttgaattaaacatcaaaggaaaaaccgattcttcagagaaaatgttcggggttgtcagcaaaggtgagctgttaaaaatggagcgcatcttatttcagctcaaagaaaaaatcgctttttcattgtccgacagctcctatatagcgctcgtcgtccatctgacgtatgctatcgaacgaattaagcttggggaaactatcaccatggagcaaaatgagcttgaggaactgaagaatgcgaaggaatacagctccgctcttgaaatcgcgggcgagcttgaacgtgccttcggcgtgacgattccagaggcggaggtcggctatattacaatccaccttcgaagcgccaatcgaaaatacaaaacagaatacaaagcgcaggaaattgagctggaaacagccctgcaaacaaagcggctcattgcttttatttcagacaaaatcagaatggatctgacgaaaaactactctttatatgaaggcttgattgcccatttggagccggccgtcagccgcataaaagaaaatattgagatatacaatccgatgaaggaacagatcaagcgcgattattttctgctttatatggcgatcgaagaaggtgtcgaaaagtattttccgggcatgtccttttctgatgatgaaatcgcttttatcgttcttcactttggctcggctcttgaaatcaaaaaagaagaagcaaaagtgaaagcgcttgtcgtctgctcaagcgggatcggctcctcgaaaatgcttgcctccagactgaaaaaagagctgccggaaattgaatcgtttgatatgtcatccctgatcgagctaaaggggaaggatgttcaagcctatgatatgattgtgtccactgtaccgattccttatgaaaacattgattacatcatggtcagcccgctattaaatgaggaagacgcaaaccaggtcaagcagtatatcaagcggaagattccccttattcttaacaaaaaaagaagcccgaaggaagaggcgcagcaagctgatgtacctgacatgctagaggcggcggaaagcataggccggtatatggaagttatccaagatgttctgcgccattttacgctagctcaactcaaaacaaacccggaccatagcatgcttctgctagagctttttcaacagctgaagaaggatggcctgatccgtgatccggaaaaagccgcggtttgcctggctgagcgggagaaacaagggggattgggaatccccggaacaaacatggcgctttatcatctcaaaaatgatgaaatcgtcctgccttttttcaaaatgtttgatctcagcacctcctatgaagtggatggcatggacggaaataccctcaggatgacacgcattctcgtcatgatggcgcctagctcattatctgctgaaggctcggagattttaagcgcgatcagctcggcaattatcgagagcagagaaagcatggcggggtttcaggaagaaggagaacaagaattgtatcagcggttaaaccgcatatttttcacatggatgaaagaaaaaaacatactgtaaacctgcatggcacacgtcaaaaatttggcgtgtgtttttctgtggatggggaacaaaataagaaaatgtgggactattttatcattcagtattggaataattccaaaatgaaatagttttacaagttatcttttttgggttaaaatgggtgaggcaaggaagaaaatctaacaaattattgaagattcaagagaatataggagatgacgatatggaaacattacagcatctgattctgcatgacatgccgaatagcgaagaaatagaggctgtaaaaagcggagaccatacactgacatataaaggttaccgtaaacggattaatcagctggcgaatgccatgcttcaaaaaggaattcaaaagggcgaccgtgttgcattgctttgcaaaaacggccatcccgcatcaactgttatgttcgccgcgcttgaaataggtgctgttgtcgtacctgtcagctggcagctgaaaccatatgaaatgacaggcattttaaaagcaagtgaaccgaaagcgatgttttacggagcggagtttaaagagatactggatgaagttctacctgaattgtcctcactgtgtgtaacaatggaaacaggaacagcttacgaaacatctgctgaatttgaagcgctgtttgcaggtcctgatcatttgccagagacggaaatggtttcacctgatgatacagcacttctgatgtttacatctggaacaacgggaaacccgaaaagatgcatgattacacatggcggcatatacagatacgttaaaaaatccaacagctcaatagcacgtatgaagggccttcgttttctcgcgtgccatccgatttatcatacgagtgcgctcatttgcatcatgcttggaacgtttgcagaaacaacctttgtgtttacaaaggatcaagatcctgttcacatgctgaaggtcattgaagaagagaaaattcagaccgtgatggctcttcctgtgttttacacgtatttgcttgaggcgtgggaaacgcaccaaactgacttatcttcacttgttattttaatgacaggcggaacaaaagtgccgagcagcctaatccgccgctatcttgatattggcattccgctcgcgcatggctatggaagcactgaggcttggggcatcagcacatggacgcctgatatgggaatggataaagcggcatctgcaggaaaacctgtggcaggtgttaaagtcaaagtggaagatcctctgaccggagaagaacttcctcaaggagaaatcggcgaaatcgttgttcatactccattcttatttaaaggctatgaagacaatcctgaagcaacagcgaaagtgctgcaaaatggatggtttagaaccggagattcaggatatgtagatgaagatggctttattttcatcacgggacgctacaaggatgtcattatttacggaggcgataacgtctatcctgatcaggttgaagaagttatccagcagatcccgggaatccttgaaacggctgtggtcggtattccagacccgctttacggtgaaaaaccgaaagcttttatcgtgaaaaatggcggccagcgcatcacagaagaggatgtcatcgcattttgtaaagaacgcctgtccgcttacaaaatacctgaagttgaatttgttaacgaactgccgaaaaacaaccttggcaaggtgaaaaaagacgtcctgcgcaatcaggctgtacattcataaaagaagaagcccgtccactttatgtggcgggcttctttgcacttgcacagacggaaagctcaggcttaatgttcttaaattgtatatcaatgtcttcgaagccggctgctttaaagtcagcaatcatctgtcttccaaatgatttggttttttcaggactggcatccgcttcccgcggctgcatcgtaatggctgctttgccgcctggctttaatgcccgataaatctgtttcatgccttttgtttggtcattccaaatggtgtagttgttaacggaaatcactttatcataaaacgaggcggggagaggaaatgtctcgatgcttccttgtatcaggcgtacgccctttggtttcactctgcgggcggccagcttcagcatggcctctgacacatcaatcccatgaagatgaacatccttctcgcgtttcagcatctgctgcatgcagtatcccgggccaaacccgacttctaaaatgctgtccccgcgcgtgatacccagctgattgattgtccactgattcagtgtttgattttcagcagccatgatgtacccggcaatcatgccgatgacgccctttggcctgctgaatcttctagaaagcatgttaatcattcagcaaccaaccccctttttgagttaatttcctcccagcgttccatgtgaaacatttttctgataaagcaatgcgaaggtgccaagccatgtttatccatagagtgtgtgaggtacacaacaaatagacatgaaaacaaaggaggagaatcatcatggcaaattatccaaaagaactgccggcacaaactcaaagtcgccagccgggaattgaaagcgaaatgaatccaagtccggtgtatgagtacgaggattataaaggagcagacaaattaaaaggaaaagtagctcttattacaggcggcgacagcgggatcggacgcgcggtttccgtcgcttacgcaaaggaaggcgcagacatcgccattgtgtataaggatgagcatgaagacgctgagaagacgaagaaacgtgttgaacaagaaggcgtaaaatgcctgctgattgctggtgacgtaggtgaagaggaattctgcaatgaagcggttgaaaaaacggtcaaggaactaggcggccttgacatccttgtcaacaatgcaggtgaacagcatccgaaggaaagcatcaaagatattacgagcgaacagcttcaccgcacattcaaaacaaatttttattctcaattttatttgactaaaaaagcaattgattacctgaaaccgggcagcgccatcatcaatacgacatccatcaacccgtacgtagggaacccgacactgattgattatacagcgacaaaaggggcgatcaacgcctttacaagaacaatggcgcaggcgcttgttaaagacggcatccgtgtaaatgcagtcgcgccgggtccaatctggacgccactaatcccagctacgttccctgaagaaacagttgctcaatttgggcaggatacgccgatgggccgtcctggacagcctgttgagcacgtcggctgttatgtgctcctggcatcagatgagtcctcttacatgacaggacagaccctgcatgtcaacggcggaaactttgtgacgacataagagggagtgagacatatgagcatcacgaaagaagaagtgaacagctactatcaaaaagcagggattgtattaacggacgaggaagtagaccaaatccagctgatggattacggcttaggaaaagaaagaaaagtcgggctccagctcttcgtctacgtcaatacagaccgttattgttcaaaggaattggtgctgtttccgggacagacttgcccggaacaccgccatccgccggtcgacggccaggaaggcaagcaggagaccttccgctgccgctacggaaaagtgtatctttacgtagaaggagaaaaaacgccgcttccaaaagttctccctcctcaggaagacagagaacactatacggtctggcacgaaattgagctagaaccgggcgggcaatacacgattccaccaaacacaaagcattggttccaggccggggaagaaggtgccgtcgtgacggaaatgtcatcgacgagtacggataaacatgatatctttaccgatccaagaatataaggatgggcttaacagcccatcctttttgtattgaaaaaaacagaatcatcgctataatggttaaaaaaggaaagagggcgaggcaatgttcacttgcaaggtaaatgagcacatcaccatccgattattggagccgaaggatgcggagcggctggccgaactcattatccaaaatcagcagcggcttggcaagtggctgttttttgcggaaaatccaagcagcgctgacacgtaccgagaaacaatcattccagattggcggcgccagtatgccgacctgaacggcattgaggcgggtctcctttatgacggcagcttatgcggcatgatcagcctgcataaccttgatcaagtgaatcgtaaggcggaaatcggatattggattgccaaagaatttgaagggaaaggcattattacagctgcctgccgaaaactcattacgtatgcttttgaagagcttgagctgaatcgtgtggcgatctgtgcggctgtcggaaacgaaaaaagcagagcggttccggagcggctcgggtttctagaggaaggcagggcacgggacggcttatacgtaaacggcatgcatcacgacctcgtctactacagtctgttaaagcgtgaatgggaaggcgaaaaataaagagcacactttcttgtttaaatcttccccggatgtggaaaagtaacagcggagacgttaaaaaggagtgattcgagatgaatcagcaagacattaaacaaaaagtgcttgatgttctagatcaccataaagtaggttcgctcgcaacagttcaaaagggcaaaccgcattcccgctacatgacttttttccatgacgggctgacgatttacacaccgacaagcaaggaaactcataaagcagaagaaattgagaacaaccccaatgtccacattttattaggctatgattgtgaaggttttggcgacgcatatgtcgaagttgccggaaaagccaaaatcaacaattcggcagaactcaaggacaaaatatggagttccaaattagagcgctggtttgacggcaaggatgatccgaatctggtgattcttgaaattgaaccggaggatatcagattaatgaatgccggagagaaaacaccggtctcactcgaactataaaaaatttgtgttttcaggggcgatatgttattatgaatagctagtaagaaaaataagcaaataaaaaagaaagtaaacttcttttttctgttttgagagagaagcttaccgcttcccaagcagcataaccagctgcccttattcttttccttcataacaaatcgcccctaacgatgagatggaaaaaagacttttttgttttacaattcacaccggcgcggcttcggagccgcagtgacgattgagaggtagggctttcgttgtcttgtgttcaagaaatttccatggtgtttactttccagaatgattcttcggaacaatgctttatgaatctaacccgcctgacttggcggatgatataatctttatttgcgtatagaaaagaataagacaaaccgcccggcgtacgccggacggtttttttattgcaaaaaacacatcgtactgaaacctccttgtcttctttccagtcttatctctaggatgaaattggaggaagaataacgtgcatgtcattacaacacaagtactttttattttttgttttttattgctgattcactcgatagaaaccttagcctatgctacaaggctttccggggcccgcgttggatttattgcgtccgcgctttctctgtttaatgtcatggtcatcgtatccagaatgtcgaacatggtgcagcagccctttactgggcatttaattgatgctgctggaaaaaacgcactggcgattgtaggggagcagttccgctttttaattttcggatcgacagtcggcaccattttgggcattatcctgctcccgtcttttgtcgctcttttttcacgggcgattattcacttggcgggcggcggcggctccgtttttcaagtattccgaaagggattctcgaaacaaggattcaaaaatgccctttcctatttgcgtctgccgtccatttcatatgtaaaaggatttcatatgcgcttgattccgaagcgtttgtttgtcatcaacatgctgatcacatcgatttatacgattggcgtgctttcggctttatacgcaggccttctggcgccggagcgcagcacgacagccgtcatggcttcgggtttgatcaacggaattgcgacgatgctgctggccatttttgttgatcctaaagtatccgttctagctgatgatgtggcaaaaggaaaacgaagctatctctatttaaaatggacctctatcacaatggtcacatcaagggtggcgggcacactcctcgcccagctcatatttattccgggggcctactatatcgcgtggctgacaaagtggttttaataagaaaggctggatcataaagatccagccttttttgcattcccttatttatatttccttaatccgcggtcgtacaaaaaatttccgaatgggacgaaagcagcgacgaagccggcagctgaccatttcagcggccatttgacagagaaggttgcataagccaagacaagcaaatacaaaatgaacaacccgccgtgaaccgaaccgacaattgtcaccgcaagcggaaggcctgcccaatatttaagcggcatagcgatgaacaacaggattaagagtgacattccttcaataaaacccatcgtgcgaagtcttccgatcggcgtgtgcagcataaatcgccctccttgtggacacgttttcattttatactataaacaatccggaggggcatatgacagctttcaaaaaatgttcggaaaacattcatttttacatgccttttctagggaactgtacttgtcatttacaaaaatacccgagataatgtgtacaaaatcaaaaaagaaggatgttgaaatgaaacttgaccagattgatctgaatatcattgaggagctgaagaaggacagccgtttgtcgatgagggaattaggcagaaaaattaagctgtcgcctccatctgtgacagaacgggtaaggcagcttgaatcgtttggcatcatcaagcaatacacgctggaggtcgaccagaaaaaacttgggcttcccgtttcctgtattgtggaagcaaccgttaaaaacgcggattacgagcggttcaaaagctatattcaaacattgccgaatattgaattttgctaccggattgcaggtgcagcctgctatatgctgaaaatcaatgccgaaagcctcgaagcggtagaagatttcattaacaaaacatcgccctacgcgcaaaccgtcactcacgttattttctcagaaattgacacgaaaaacgggcgcggttagagagtgccgcgtgaagtctgttataataacaggatgagcgcgaaagaaagagaagtgatcaagcatgtcaaaaacagttgtattagctgaaaaaccttcagtcggccgggatttagcccgggtgctgaagtgccataaaaaaggaaacggttatctcgaaggcgatcaatatattgtgacctgggctttaggccatttggtgacgcttgctgatccggaaggctacggaaaagaatttcaatcatggcgcctagaggatctgccgattattccagaacccttgaagcttgtggtgataaaaaaaaccggaaagcagttcaatgcagtcaaatcccagcttacccgtaaagacgtcaatcagattgtcatcgcgactgacgcaggccgggaaggtgagcttgttgcgcgctggatcattgagaaagcgaatgtccgaaaaccaatcaagcggctgtggatttcatctgtgacggataaagcgatcaaggaaggttttcaaaagctgcgcagcggcaaagaatatgaaaacctgtaccattctgccgtcgccagagcggaagcggattggcttgtggggatcaacgccacccgtgcacttaccacaaaattcaatgcccagctctcatgcgggcgtgtgcagactccgacgcttgccatgattgcaaagcgcgaggcagacattcaggcgtttacgcccgttccgtattacggcatccgtgctgcagtcgacggcatgacgctgacgtggcaggataagaaatcaaagcagacgagaacgttcaatcaagatgtaacaagccgtttgctaaaaaatctccaaggaaagcaagcggtcgtagctgagctgaaaaaaacagcgaaaaaaagctttgcgcctgcgctttatgatttaacggagctgcagcgtgacgcccacaagcgcttcggtttttctgctaaagaaacgctttctgtactgcagaagctatatgagcagcataagctcgtcacatatccgcggacggactctagatttttatccagtgacatcgtcccgacgttaaaagaccgtctggaaggcatggaagtaaaaccgtatgcccaatatgtcagccaaattaaaaaacgcggcattaaatctcataaaggatatgtcaatgacgcgaaggtgtcagaccaccacgcgattatcccgaccgaagagccgctcgttctcagcagtctgagtgataaagaacgaaagctgtatgacctgattgcgaaacgtttcctggctgtattaatgcctgcattcgaatatgaggaaacaaaggtcatcgcagaaatcggcggagaaacctttacggcgaaaggcaaaaccgtgcagtcgcaagggtggaaagccgtttatgatatggcggatgaggatgatgagcaggaggatgacagagatcagacacttcctgcgcttcaaaaaggcgacacacttgccgtccgcacgttaacggaaacaagcggccaaacgaagccgcctgcccgctttaatgaaggaaccttgctgtcagcgatggaaaacccaagcgcgtttatgcagggagaagaaaaaggcctcgtcaaaacgcttggagaaacaggcggcctcggcacggtggcaacgcgtgccgacattattgaaaaactgttcaacagctttttaatcgagaaaaaaaaccaagatatttttatcacttctaaaggaaaacagctcctgcagcttgttccggaggatctgaaatcaccggccttaacagcagaatgggagcaaaagctgtctgcgatcgcggccggcaaattgaaatcggctgtttttattaaagatatgaaggcttacgctcaccaaacggtaaaagaaatcaaaaacagcagccaaaccttccgacatgacaacattacgggaacggcatgtccggaatgcggcaaaatgatgctgaaagtaaacggcaaacgcgggacgatgctcgtgtgccaagatcgtgaatgcggaagcagaaaaacgattgcccgaaaaacaaacgcacgctgcccgaactgccataaaagaatggagcttcgcggccaaggcgagggccaaacctttgcgtgtgtgtgcggtcaccgtgaaaagctctctgtatttgaaaaacgaaaaaacaaagacaaagcgcgtgctaccaaacgggacgtatcctcttatatgaaaaaacaaaataaagatgagccgattaacaacgcgctggcagaacagctgaaaaaactcggtttggataaataataaaaaaacctgtgcctatcgcacaggttttttattggacttaggtcctgttttcttaatgttcaaaaaggggaaaaaaagctagcaatctgcatttttttcttttatagtaaatgtactttgtaacatggcagtcatattttcgtctataactatttgtgagcgtctgatttgcttcaggcgacaaagggggatttgcctgtgaggcatgtactaattgctgtcatcttattcttcttatctatcggactttccgcagggtgtgctgaagctggaaacaagacccaaaatcagtcggcgacagaagtgaatgccagcccgctccagccggcggaatatttcatctatcacaatttaatgaatgacaaagggctgatcaaaaccgatttttcagaccagccttcttacttgtcggaatctctcggactgtggatggagtttctgctcagcaaaaatgacgcaccacatttccaggatcaatatcagcatctgactgattcatttctgatgagcaatcacttggtgacgtggaagattcaaaatggccaagcgagcgggacgaatgcgctgatagatgatatgagaattatgctgtctcttgaccaagccgccgcaaaatggggccgcagcgactacgcgcaaacggctagggatatcggcacgtctttgaagacatacaatatgaacaacgggttttttacagacttttacgactcacaggccgcttcaaaggatgtgacgctttcatacgtcatgcctgatgccttagctgtcttaaagaagaatggaatcatagacgaagaaacagaacagcggaatgccaatgttctctattcagctcctttaaaaaatggctttctgccgaagacatacagctcggagacgaaggaatacacatatgatagtgaaatcaacctgattgatcagctttacgctgcttggcatttgccggaaggggatgaaaaagcatctgttttagcggactggatcaagcaggaatttcagaaaaacggaaagctgtacgggcggtattcggcagatacgaaggagcctgccgtccaatatgagtctccatccgtatatgccttagccgtattgtttttgacaaaacagcatgaaaacagttctgtcatcaaagccatatatgacagaatgaatgactttgaaattcatgatccggtgaaatcgtattatggaggctatatgagcggcactcagacgcattcatttgacaatctgctgccgctgttagccgaaaggaagctttttaatgaaaatatcattcagtgaatcacaaaaattatttgcttatttttcagggctcatcgcggccctgtctttgtttatttattatgtgtcagcccagcaatcagaaggtgctctgatccttttcatcacatttggcgtcatcgccgcaggcatctggttcggcccgatttacgcgctggcagtgaccttaatcgtactctttgttctcggcaccttaatgatgtttttccagactggacagacatcgctctttccggctgaggaagggctgcgaatgcttgtcgtgtggggaatcgcgcttttgctgttttcttttatttctggaagaatccacgatattacagcagagcttcggcgctcaataacacggcttcaatccgaaatcaaaagctatgttgctgttgacagagtgactggttttgataacaagcaaaggatgaatctggaactttcagaagaaatcaagcgggcggagcgctacggcaattcttttgtgtttttgctgctccatatgcattatttcaaagagtttaagtctttgtacggtgaaaaagaaacggaccgcctcttccaatatgtcggtcagcaaatcaggacaagcgttcgggaaacggataagaaattccgtccctctgacgagcgtatcgggatcgtgctgacgcacacgcctgctgaacatatgccggccgttctgaccaagctgaagaaacaattggatacatatcagctggaaaatggaaagtatgtgtcgcttacgttccacgtttgctatttgccctaccgcaacgatatcaaaacagctgatcaatttttagaagaactggaaaacgagatgatgatgaatgaactataaaggaatcacattgctatgcgtcatgatgcttctttttttagctattgcgtcttttcccgtttctgcgcaagcgaaagatcaggatgccggcattctcatcatctactcaaccttggacggcaaagagtcgtcacaagtcaaaatgctcgatttgcttgcgggccactttacatcccatgtgacagtcaaaaaagattcagacgttgaagcgtcggatctcaaagggaaagaccatgtgatttattacggccaaacgaaaagaaagctcagcaaaaaattgctgtctcttatcagcggcgtaaaaaaaccggttgtcgccattggctataacgcaggccaaatcagccaattttccggtctttcattagcccgcaaagaaaatgtgtttcaggttcacagcaggtcggaaaaggccgatgtgtctctggaaagcgggcttaacgtgctgagtgtatcaggcctgaaaggaacggcgctttacaccttcaaagccgatgacggcacaacgcattcttttatatggaaaacaaaaaaagggaatgtgtacattggattaacaaatttgttaaatgacaatttgatcgtggcgaaacagctcagagaagctttcggagagaaggcggggacgacgttattgtatttgcgtctcgaggatatcagcccgatgtctgatgaaaaattgctgcttcaagccggtacatacctgcataagcggcatattccttttatcctggcggtcattccggtttatttgaatccggaaacaggcgacaaagtgtatttgtctgatcaaccgaagatggtcaaggtgctgaagaagctgcaaagcatgggcggcagtatcattgttcacggctatactcacgcttatcgctacagtgaaacaggagagggctttgaattttgggatgcaaaggcggatcagccgattacatccggaaatgccgaagaccccccgtccattttggagaaagaacaggacttcccgaacgaacaagcctatcacagctatctcgaaccatttcgggaaaaggaagaaacgtatacaaaacaaaaactgacgcgtgccattgaggatttgacatcatcgggtctttacccgctggcgtttgaagcgccgcattacacgatgtccgaatatggctatcaaatcgcctcgcagtattttacaagcattttcggccaggtccagctcagcagcacaacatggaaaacatccggtgcacctccgtttgtgactgctccttcgatgttgcacggaatgacgctttatccggaaacgatcggctttgtcgacacatcgaagcaaaactcgctcggtgagatggaggagcacatctcccagatgattgattttgaaggcggagtagccggaggattttatcacccgtacctcgggatgaaatatctgccggagctggttgatcagatggaacgcattccagacagtgaatggcttgatttaaagaaaacgaaacaaaccgtcaaaacagacaaagtggaaattcatacaagcggtgacggaacgattcaggtgaaaaacggcgtaagcgcgattgacgagtttttcgatcatcaccggcaaacccctctggaaaaggcgttatggattctctccgctgttgtgctcttatttgtcatcatgtttgtcagttatacgttttacttgagagccacattgaaaaaacgaatttttaaggagagaagaagccttgggtaatacgctgttctttatctcgctaagtttaatatgggttatgcttctctaccacatgttcctcatgcagggcgggtttcgccactatatgaccttcgaacggaatatcccgaagtggagagaaaatatgaaggaactgccgaaggtcagcgtcctcatcccggcgcataacgaagaggttgtgattcggcagacgctgaaggccatggtcaacctttattatccgaaggaccggctggagattatcgtcgttaatgataattcatcagaccggacgggtgatatcgtcaatgaattttccgagaaatacgatttcatcaaaatggtgattacgaagccgccaaatgcaggaaaaggaaaatcctctgcacttaactcgggttttgccgaatcgaacggcgatgtgatctgtgtgtatgacgccgacaacacgcctgagaaaatggctgtgtattaccttgtgctcggcctgatgaatgacgaaaaggcaggcgccgtggtagggaaattccgtgtcatcaatgcggcaaagacgctgctgacgaggtttattaatatcgaaacgatctgttttcagtggatggcccagggaggcagatggaagtggttcaaaatcgccacgatcccaggcaccaacttcgcgatccgcagaagcattatcgaaaagctcggaggctgggatgacaaagcgctcgctgaggatactgagctgaccatccgggtatataatctcggctatcacatccgctttttccctgccgccatcacgtgggagcaggaaccggaaacatggaaggtatggtggcgccagcgcacccgatgggcgcgcggcaatcaatatgtcgtgctcaaatttttggcgcagttttttaagctgaaacgaaaacaaattatctttgatttgttttattttttctttacgtacttcctgtttttctttggcgtgatcatgtcaaatgcgatttttgtagtgaatttgttttatgatttgcatttgtctgttggatttttggcaatgattctctggattttggcgtttttcttatttatgacagaggtcatgattacgttgagcattgaaaaaacagaaatgaacaagcaaaacttttttatcgtatttctcatgtacttcacatactcgcaggcatggattgtgcttgttatctactctttattcgtagaaatcaagcaccgtttattcaagcaagaggtcaaatggtacaagacagaacgatacaatcaacataaaagcgggtgacctttttgaaacaaataatgatttttctcacaagcttcatgctgctggcgatgactggacaaacggctcttgccaaagacgtacaggtcagcggttcgctcctcgggaaaagcagccaagaacaagccaaacagcaggtgctgacaagcgagttgattacactgtatggatcaaaagacagcgcagagctgacgtaccagatcccggcaggcgcctcttcgggcaatcagcaattggtaatcgaatacgaggcatcaaatcttttaatttctccatcatcgttaacggctgtcattgatgatgaaccggtcaagacgttaaagcttgatggtgattccaaacggaaaacagtgaagctgaatctgaataaaagccagtctgcgcaaggctatcacaacgtatcgctgaaattctacggcgtaatgaaagagggcgtgtgcgtcagacaggatacatcaggcaactggatcaaaatttatccggacagccggctgacacttgctgacagcagtgaagcgaagggaacgtcgctggaccattatccgtatcctttcgcccaatctggaaatacagcggaagaaacagctatcgtcattccggataacccaagttcagcagaaatagaagctgctgttaaaacagaaggctatttgaaaacggtggacagcagtgtcagtattgcgtatgtcacggaatctgaactgaaaaaaatcgataagccgacgattgttatcggcgtggacaagcattggaacggcaaagtgaaaaaactgttgaaacaagctgggctacaggcaaaaggagaaaaccttctgcttgcggagcgggtgctgaaagcagagggcaaacagcagccggttctgtttgcgcaagcggcgtccgaggacgcgctcactaaaaaaatcagcgtgatgacagatcagacatatacaggccagctcagcggcgatacactttcaatcagcaagcttcagcagactgaaaaaaaagaaagcgataagctgacccttgagaattttggagcgggtgatatcacaattggagccgacaaaacatcttcagcacattatttttatccggcttcggctgttttagatgaaaaccaatcggcgaagctgtcgcttaaactgaaaaagtctgaaacgattcaagcctcagcgactgaaaacgagtctgcctctcaggccgcagaactgaaagtgatgatcaacggccagccgcactcggtccgacttgatgaattaggaaaagaagataaaaacggattctatcatgtcacagtgaaagtggaccctaaactgctgcaaaaaaaccgctacattgatattcagttcgtcacgaccggcttaaaggaaaacaacccttgcaacaccactgatgaggaaaagtgggtttttatcgataaaaacagtacattatcatacgccatcaaaggcatgtctccgtcagcggattttcaagagtggccgcttccttacgccggaaaccaggatcaaacaacattaatcgtgcttcctgacaccgtaagccaatcgaagcttgaggagctttctctcgtaacggaatcctttggcagcgaagcacagcattcatatacagtaaagaaatcatctgacgttacagcaaaggatgcgaaaggacgaaacctcattttcataggagggatcaatcaattttctcttctgaaggagaaatcatcagatctgcttgtgccgcaggagaagaacggctcgtttgatgtatctggtttcgagatgctgaatgagacgacaaaacaagtggtatttacccaagcatcggtttgggattcacgctatacaatggcagtctttgcaccgtcaaaaggagatggaacggctgtcacaaaagagatcatcagttatctgaacagcaacgatgagtcggcaaccgtccttaatgaaacaaacagccagcaggtgtttacaaaccaccagcagctcaaatcggaaacaaacagttccgatgcagaacaaccaacacaggatcatagccagaaatggatgtatattggtgtgctggcactcattatggtggttgcggcagtgttcatttggattgccgtaagacgcagaaaaagaaagacagatacagaataaaacagaggctattttagcctctgtttttttatttttggtaagtaaattccatttgtggaacctgtcattttatttttttctctcagccaataagcctctttacaacgtgcgggaacgggagtatgatctcttttagaaaacaaatcgcttaatctgaaatcagagcgggggacccaatagaacggctttttgccgttggggtgaatcctttttaggtagggctaactctcatatgcccgaatccgtcagctaacctcgtaagcgttcgtgagaggagatgaatgaaacctgtgttcgatgttatggcacaggggcatccgtttgcctctgtgttttttgttgttcatttttgaatgcaaatcgcatacagagacatcatagcagaaaggactatcatcaacatgtgagagcaagacactgatggatgttttattgttttaattgaaaaatgagaaattaaaaggggaagacatcgatgtatcattcaatcaaacgttttttgattgggaaaccactaaaatcccaagcagctggagagcaaaaactgacgaaattaaaagccttggctatgctttcctcagatgcgctatcatctgtcgcatatgggacagaacaaattctaatcattttggcaacaatcagtgctgccgcattttggtactccattccgattgcggtgggcgttctcatcttgctgctcgcactgattctttcatacaggcaaattatttacgcttatccgcagggcggcggggcgtatatcgtttctaaagaaaatctcggtgaaaaaccgggattgattgcgggcggttcattgcttgttgattatattttaacagtagcggtaagtatttccgcaggcacggacgccatcacgtcagcctttcctgtattgcatgattatcatgtgccgatcgctatttttctcgtgttagtgattatgattttgaacctgcgcgggctttcggaatcggcatccattcttgcctaccctgtttatctgtttgtggtggcgcttttggttctcattgcagtcgggttgtttaaacttatgacaggacaaatagaccagccagcccatcatacaccgctcggcacacctgtagccggcattacgctgtttttgctgcttaaggctttttcctccggctgctcagcgttgaccggggttgaggccatttctaatgcgattcctgcattcaaaaacccgcctgcgcgaaacgcggcaagaacgcttgcgatgatggggattttgctggcgattctgttttccggcatcacggtgctcgcgtacgggtatggtacggcgccgaagcctgatgaaacagtggtttcacaaattgcgtccgaaaccttcgggcggaatgtgttctactatgtcatccaaggtgtcacatcgcttattttggttcttgcggcaaatacgggattttcagccttcccgcagcttgccttcaacctggcgagagaccagtatatgccgcgaatgtttacagtcaggggcgaccgcctaggcttctcaaatgggattatctttttaggcgttgcttccattgtgctcatcctgttattcgggggacagacagagcacttaattccgttatatgctgtcggcgtatttattccatttacgctttcgcaaaccggcatgtgcatcaaatggatcaagcaaaaaccaaagggctggatcggaaaaatgctgatcaactcttgcggcgctttgatttcgtttatggttctgtcgatcctgtttgtgacgaagtttaatgttgtatggcctgttttaatctttatgcctatcgtcgttctgttgttttttgcgattaaaaatcactacaccgctgtcggcgaacagcttcgcatcgtagacaaagagccggaagaaatcaaaggcaccgttgtgattgtgcctgtggccggtgtcaccaccgtcgtacaaaaatcgattcactatgcgaaatcactgtccgatcaggtgatcgccgttcacgtgtcatttgacagagaacaggaaaagaaattcgaaaaacgctgggaagagcttaataacggcgtgcgtctcgttacgcttcactcctcgtatagaagccttgtccatccgtttgataagtttttggaaacagttgaggcgaaagcgaagaaggagcagttttccgttatggtgctgtttccgcaatttataacgaaaaaacgctggcacaccatccttcacaaccaatcagccttcctcctcagagtccggctgttctggaaaaaggacataatggttgccacactgccgtatcattttaaaaagtaaagctctaggaccaagggaatcaccttggtccttttttgcggaaaaaggaggtatggcggtgtatacacaaggtgcttttgtgatcgtactgaacgaaagtcagcaggttctgctggtgaaacgaaaagatgtccctttatgggatttgccgggcggcagggttgatcccggggaatcggctgaggaagcggcagtgcgggaggtattggaagaaacgggatacaatgcagcgctttctgcgaaaataggtgtttaccaaaggccaaagtttcaagatgaacagcatctgtttttcggaagcataacaggcggacaagcagtggctgacggcacagagacagcgggattaaagtgggtttccccggagcgtttgccgctttttatggtgccgaaccgaaaaaggcagatcaatgatttcaagaatggcgctcaagatgtaaatgtcaccgtcaaggatagagggttgctcgcggcgatcgacctgttgaaaagaagactgggcaagtgattcaggtctccgggttttaaagcctttctcctgtggtattgaaaaaaggaaaaaggaggatacgttatggcacacaaaactgcaggacaagcaatgacagagctgcttgagcaatggggagttgatcatgtatacggcatccccggagacagtataaatgagtttattgaagaattaagacacgaaagaaatcaactgaagttcattcaaactcgccacgaagaggtagcggcactggcagccgcagctgaagcaaaactcaccggcaagatcggagtctgtctgtcaatcgcagggccgggagcggtgcacttattaaatggtttatatgatgcaaaagcggacggcgcccctgtgctggcgattgcaggacaggtttcttctggcgaagtcggacgggactatttccaggagattaagctggagcaaatgtttgaggacgtggctgtgttcaacagagaggtacatagcgcagaatcacttccggatctcttaaatcaggcgatcaggaccgcctacagcaaaaaaggcgttgcggtattgagcgtgtcagatgatttgtttgcggagaaaatcaaacgggagcccgtgtatacttcaccggtgtatattgaagggaaccttgaaccgaaaaaagaacagctcgtcacctgcgcccaatatattaataacgctaagaagccgattatcctggcagggcagggaatgaaaaaggcgaaacgggagctcttagaatttgcggacaaagccgccgctccgatcgttgttacactcccggcaaagggtgttgttcccgataagcacccgcattttctcggcaacctcggtcagatcggaacaaagccggcttacgaggcaatggaggaatgtgatttattaatcatgctcggaacgtcattcccgtaccgtgattatttgccagatgacacgccggcgatacagctcgattcagacccggcaaaaatcgggccttgtctgcgattcggctctcggtctgcgcgaattgacagagtatattgaacgcaaggaagacagaagattcctaaatgcctgcacagaacatatgcagcattggtggaacgaaattgaaaaagatgagacagaggccacaacaccgcttaaacctcagcaggtcgtggcccgtcttcaggaagcggcagccgatgatgcggtgctctctgtcgatgtcggcactgtgacagtctggatggcgcgtcatttcaaaatgaacgcgaatcaggatttcatcgtctccagctggcttgcgacaatgggttgcggcctgccgggagcgatcgccgcaagcttgtccgaaccggaacgccaggcgatcgctgtctgtggtgacgggggattttccatggtcatgcaggatcttccgaccgctgtcaaatataagctcccgatcacagtcgtcattttaaacaacgaaaatcttggcatgattgagtacgagcagcaggtcaaaggcaatatcgactatgtcacaaaacttcaaaatgtcgactatgccgcatttgcagaaagctgcggagcaaagggcatcaaagtgactaaagcgggagagcttgcgccggcattccatgaggcgctgcaatctgaccaaccggtcgtagtggatgtcatgattggaaacgaaccgccgcttcctggcaaaatcacctacgggcaggcgaaaggctttagcaagtacatgctgaaaaacttcttcgaaaaccaaaaatttgaaatgccgtcactgaagaaaagtttgaaacggttattttagaggcccttttagaggcctctttttttgtgttggaaacaaatgtatttcaggttatccttgtattatattggtatgaggaggattacatgtttgagttcataaaattattgttgtatgtattaggatctgcaggaatgatctatgcgtcatatcacgattttcgccatgctcagaacgggcaaaaggacaaatgcatcttctttcaaagcaaaaagaccagcgcatttgtccttgtatgtttcatttgtttattcttatcaaatctaacagagctcttctcagtatagggttatttctcttttttcttcagcccgaagaagaaaggaaaagcagaaccgaccaagaaggtgccgaataaaaacatgccgccgataaacacgtggaaatttgtgtgtccggccgtaaacgccgtgattagggaaataatactgagcacgatcatggcaatgccgggcgcgactctcatttttcccttggatttatgggcagcaacagaacataaaatgccgataacaataggaacaatccacaaataaaacagaataaatactgacatcatcaaaactccgatttttcttctatcataacaaatttctgtcaaaaagggtatcaaagagcttttgcgaaaaaataaaaaccggctttagaagccggtttttttatcgaaacgtatctacaattaaaaacacattcaaagcaacgatcaatacagcaatcagccaagacaccactgtgacccatttggcgttgatcagagatcccatgatccgtttattgcttgtaaacataataagcggaatgagggcaaaggcgatcccgaaggacagcacgacctggctcagtacgagagcggtcgtcggattaacacctgacgcgatgatcaagatcggcggaatgatcgtgataaaacgccgtacatacagcggaatgcggtagttgataaatccttgcataatcacgtcgcctgaaagtgtgccgacagacgaactggatagaccggcaacgagcagcccgatcccgaataaagccgcagacatagggctgacaagatgtccgaattgctgaaatgcgacgtcgagatcctcaacaaacaggccgtttttgaagaataatgcggcagccacaatcagcatacttgcattaatagcccctgcaatcagcatcgctattaaaatatcaataaattcaaacctaaagatttttttccgttctgcatcagttttgccaaccacccgccgctgtgtaagggcagagtgtaaataaatggcgtgcggcataacagttgcgccaagaatacccgctgcaagaagcacactgtcggtgccatgaaacgccgggacaaaaaggcccttcatcactgacacggcatcaggctttgcgaaaaaggtctgcagcgcaaaggcgatcacgaccacaaacagcatgccggcaataccggcttcaagtgagcgataaccgcggcgctgaagctccaatatcgcgaaagaaccgatcgccgcaataatagacgcttcaagcatcggaatgccgaacagcaaatacagtcccagagccgctccgataaattccgccaggtcagttgcgataatgacaagctcgccctgaatccataatccgatcgagacaggcttcgggaattcttcacgggcaacctcaggcagatttttgcctgtcgcaataccgagtttggcggatagggattgaattaaaagggccatgatattagaaaataagatcacccataagagcatatatccgtatttagaacccgccgaaatattcgttgcgaagttgccgggatcaatataggcaatggctgctataaatgcagggccgagaaaagggagcagccctctgaatcctctgattttcccgtcaagcgcatcttggacggctttggaacggggagattgtgctgtgatgtccttgttcatcatgtctcacctgaattctgtttgtttttgccgtacaacaaagagtttccttaaggcaaattattttatctacatcatatgaccatcccggtttcttgtcaaccgaaaatgttcaaaatacacttctgaatttttccctgttatgtaacatgatatgtaggaattcgggataaggtcccatataaaaagacatcgtttcagttcgaaacgatgcctcctgtatctaatgagtctaggcttccttccgcagcccgcggaatataaggcccagcaagaacacgaagatggctgccccgatgatggccgggaaaatagcaaagccggcgaggctcggtccccatgtgccaagaagtccgtgcccaatccaagcgccgatcagcccggcaatcatagagccgaaaattcctcccggcagccggtttcctacaatggcgctcccaattaatccgataacaattgcaacaactaatgaaaccaaaaagctaagcatcatgatcacctctcataaatgatttaccaatcaataaccgctcctgatcatttcgaaacacttaaaagcatattcctttatgatcctgttttaatctttctctgcacactgccgtcagctaaatgaacaatgacctcagtgcctttatgcgccgcgatttcctttgcccgttcaatcgcttctttctttgtatctttgatttcagacacacgtttggcgccctcggctttgactgcccagccttttttatgcttaataacatgctctgctttattcatgagctcggggccgctgccgctgcttggatcagcatcgcgttctgtctcatcatcatgcgtcaggaaatcatcaatttcatctgtagaggcgttttccgcccattccttcgctttgcttgtcgcaattggaatcgcgcgcccttcctcatagccttcatcaatcatcgcattcgcaatgtctatcgccttttttctcaccggcttctcaagattttttaatgaagcaggataatccttcatcgaccaaggcatgtccatcactccttttccttttataaaaatggtacccgcaggtgaaaaataaaaacgcatccgaaaaaatgaaggtatactatatagtagaaaaaacggaagggaagtgcggattgggtgccaacagaacgaaaagaagacttacatcagcaattaaaagagatagagaaatgggaaaaagatcagcaaaaagtctggttttgggaaaagctcagccgtctcccgtttcaactcctggacaagctgacaccagaattcatccagaaaaagatcggcaagctcttggatgaggtcggcagctttgttcaaacaggcggacagtacctgacatctgaaaaacagattatcaggatatttcaaaagaaactgccggaggagatctttgaatcgctggaggacatccggaaggcgcctctttctgtcatggatgaaattgcggaaggaatgggcaaaaatagaaccaacgcagcaaccgttcaaggcgcgacaaccggtgtgggcggcgtgtttacgctggcggcagacattccggcagtgcttggcttatcactaaaaacattacaggatatcgcagtcgcatacggctatgacccaaaggagaaaaaagaacgagtcttcattgtgaaatgcctgcagcttacgtcggctgatgttgtcggcaaaagatcgattttgcaggaattaaaacactacgatcaagaccgtacatataagaatgtcgcttctcaaatccaaggctggcgagaagtcgttttgggctatcgagacacgtttggctggaaaaaacttttccagatggtgccggttgccggaatggtttttggcgccgctgccaatcgctcaacattaaacgacattaccgagacaggcatgatgctgtacaaaaagaggcgcattcttgaacgactgaaagaaacagaacgagagatggaatagcagaaagcagacggacaccgcgatccgcctgctttttttagtggaaacatacccaatgtgttttgtttgtttaaaagaattgtgagcgggaatacaacaaccaacaccaattaaaggaggaattcaaaatggcagacaataacaaaatgagcagagaagaagcaggtagaaaaggcggagaaacaacaagcaagaaccatgacaaagaattctatcaagagattggtcaaaaaggcggagaagccaccagcaaaaaccatgacaaagaattctatcaggaaatcggcgaaaaaggcggagaagccactagcaagaaccatgacaaagagttctatcaagaaatcggtgaaaaaggcggagaagccactagcgaaaatcatgacaaagaattctatcaagaaatcggccgaaaaggcggagaggcaacaagcaaaaatcatgataaagaattctaccaagaaattggctcaaaaggcggaaacgcccgcaacaacgactaatcaaaaacataaaggcagacaacctgtaaataaaaaagcgatccggcacatcagctggatcgcttttttttggaatcttctcaatttatgccactattgcgatacaataagtgaaaaaggggttttcgctaatgtccaagatgcaaaacttgctcgccatcgcaaatgaagtcaaagaaaagcacgccaatttttcaatctcagaggtcaacgaccactgcgtgcgccttgcggtgtttacgggagaatatgactggcaccatcaccctgactcagacgaattgtttattgttcttgaaggggagctgctgatcgattttaaggacaaagaaaccgcggtgctcaaagcaaatgacagcctgctgatcccgaaaggcacggttcaccgcacacgctcttacgtcagaacggtaaatctctgtgtggagcataaacaagccgaaaccgtcatcatagaggagcagccatgctaatcaaaaagatgatatgtgaagtagacgctgcaaacgctgaagcatttgcaaaagcgcagtcacagtgggaagcattatcgcatataagcggctttatcaaacaggccggcggctggcgaaaaacgatagacgagccgctcaccgcagaaatcatcagtgtatgggaaaacagagaagcctatgatcattttatggagaacgaacatgacagcatatacgaggaaaacgatcagaaggctgtaattctttcgatagaggtgacggtgtacgaagaggataaaccgttcgtttatgatctgttacataaccccgatatccggtacgaaccaaactggacggttctgaaggcataatcaaagcccaaaacatcatattttgggcttgtctctttactcgcgtcccggaagtgtattatgaacaaaaggcggtgctggttttaactccggtttttctccaaacgtttttgcttctttcacatattcaaaggcttctccgtccggcgctttttcattcagccagttttgctcggcgctttcttcgccttcagagaaattgataagctgatgtgagaactcttgtttttcgagcgctttcgggaatgtacccggcacaaccggaccttcctgtgcttctaattctttaatggcggcaagccattggttctggtgcattgtgtcacgcgccagcaggaagctgagcatatctttgacgcctttgtcatccgtcatttcaaacaggcgtgcgacctgcagacggccctgtgattctgcattcaggttggcgcggaagtctgccagcaggtttccgcttgctacgatataaccgccgctccaaggtacgcctgtactgctttccggcatggcgccaagtcctgatacaatcgcatggtgagggttcatgccgcctaggatggagccgatgaccggatcttcagcagctttttcctgctgatcaagaggggcattctcaagaagtctggcaatcatcgttgcgatcatttcaacatgcccgagctcctcagttgccgtatccatcagcaagtccttgtatttttcatttcctcttgtgttccagccttgaaataagtactgcatggcaactgaaatttctccgaattgcccgcctaaaatttcttgcatttttttagcgaataatggatctggacgatctggtttagcaggatgctgcagcatttttgtgtgcttaaacatgtacccatctcctttttcgattatctctttttatatttccgatcgatagaaagataaacgaaaaacagcgtatcgagatgggaactatgaatcttttcgcagctccaacagttcccggatcagctcccggccgaagatgggctcatactgccggtaaacagggtcaagacgcttcatccattcttgtttctctttatctgacagctcataaatatgtatagcagaattctttttgatttcttccagctgctccttgttcatttgttcggcatacgtttcattccactccgtcgtctccttcatcgcttcagtcaaaatgcgccttgtttctggtgtttgcgccttccagaagtgttcatcagtcatgacagcgtagccgagataaccgtggctgcttattgtcaaatagtcctgaacattataaaattttttagaatagatgtttgaaattgtattttcttcgccatcgactacattgttttctaacagctgaaaggtagaattgaaggattcctgatgaggtgttgcaccaagcagcttgaactgatcctcaatcacatcgctttgcataatgcgcagatgctgcccttttaaatcatccggtgttttgaccggcccttgatttgttgtgatttgcttaaagccgttcgtccaataggccagtccttttaattggtttttctttagagaatcaaacagctgtgtgccgatgcttccgttcagcccttttttggcggcgttgtaatctgtaaaagcatacggcagatcaagcactccccattcaggcgagagcatgccgagcttcgatgtggagggggcgataaattgaacatcgccgttttgcaatgcttcaatttcttcaatgtccgagtacaggcttccattgggaaatacttctatttttattttcccgcctgatttttcgttcaccagatcagcgaatttattggcggcaagcccttttggcgtattttcagcaaccacgtggctgaatttaaacacgatttgatcctgcaggccttcctggtcgtcatcataaacaatctttttattgcctgtatgatcatggaatccgataaataaagcggttgcaattccagcgatcatcagtgcgagacatgcaagcaaactcttcatgaaaagccctcccctatgttaaggataatgggggcaatgacattcgtaaagacctgaaaggagaagctgatgaacaaaaagaagctctcaatccgttggaaaatcacgatcttatcctatatactcgtcattttctcctttttgatcggcggcattgtgctcatcggcaacattcagcatacagaggagcgggagctgaaaaagcggctgatgaatacggcccggacggtgtcagagatgacagaagtgaaagaagccttggcgcgaaaaaaacaaacagaagctgttcgccatgcggttgaagaaatcaggatgattaatgaagcagactatattgtcgtcatggatatgaatcacatccgatatacgcatcctgtcagcacaagcatcggcaagaaatcagaaggtgcagacgaggaggcagcgtttgcggagcacatttatttctctgaagcaaagggcgagctcggcacggcggttcgcgctttttatccggttaaggatcaagacctgaaccaaataggcgtggtgcttgtcggaaaaacgctgccagggatcgctgacatcctgcttcatttaaagcgtgatatcgccttcatcgttgtgctgacactcggctttggccttgctggttcctttttgctggcccgccatatcaaaaaacaaatgtttcagcttgaaccccatgagattgtccgaatgtatgaagaacggacagcgacgtttcactcgatgaatgaaggggtgatcgctattgacaatcggctcgtcattacgatttttaatgaaaaagcgaaacagatctttgaagtgcagggggatctgatcggcaaggtgatttgggaggttctcaaggattcgcgcctgcctgaaatcgtggagcggaacaaagcggtttataatgaagaaattcgtgtcagcggaaaagtcatcatgagcagcagaattccgatcgtcatgaagaaaaaagtgatcggcgccgttgcgatttttcaggacagaacggaagcggccaagatggcagaggaattgactggtgtcagaaactttgtggaggcgctccgtgtccaaaaccatgagcatatgaataagctgcacacgatcgccggcctcatccagctggggaaatctgaaaaagccttgcagcttgcattccaggcgtcaactgagcaggaaaatgtgactgaatttctgcaccgctcgattcaaaatgacgctgcggcaggccttctattaagtaaaatcagaaggggaagagagctcggcattgctgttcatatagatgaaaacagcagtcttcagcaatttcccgagcatgttgatcagcatgatattgtcgtgcttttggggaatctgattgaaaatgccttcggctcatttgaaaccgttcaatctgaagacaaacgaattgacattagtatcgaacaaacagatgatatccttgctattttaatagaagataacggctgcggaattgatccggcacatatgcctcgcctttacgacaaaggttttacggtcaataaaactggcggcacaggctatggcctgtatctagtgaaacaaatcatagacaaaggatcgggcacgatagaagttgattcacatgcggggcaggggacatctttttctatcgtttttccaatgaagggggaggaagcacagcatggctcgtaaagaatggaaggttctgctcattgaagacgatccgatggttcaagaggtcaataaggatttcattacaactgttaaaggcgttactgtctgtgcaacggcaggaaacggagaggaaggcatgaagctgatcaaagaagaacagccggatctcgtcattctcgatgtgtacatgccgaaaaaagacggcatcaagaccttgcaggagatcagaaagcaaaagcttgaagtggatgtcattgtcgtctccgctgcaaaagacaaggaaacgatctcactcatgctgcaaaacggggcgattgactatatcttaaagccgtttaagcttgagcgaatgagacaggcgctcgaaaagtacaagcaatataaacaaaaaatcgaagcgaatgatacgctgtcccaggaacagctcgatgcgatcctgaatattccgcagcaggccgtacaggatctgccgaaagggttgaatcacttcacgatgaatgaagtcactgcttttttgaaacagcaaaccgcatccctttctgctgaagaggtcgccaaggcgcttggcatcgccagagtgacagccagacgatatcttgattacttagaaaaaaccgggatcatcaaattggacgttcaatacggcggagtcggccggccggtcaaccgctacgtgttaaaaggataaacctgagaccaaaaagaccaaaatgtccgttatgatcataaacttccccagacattatgaaaacgctatcattatagtaagaaagacacaaaaggcgaataggacagggggatgaaggatatgaaactgtttaaaaatttaacagttcaggtcataaccgcggtcatcatcggggtcattgtcgggctggtctggccggatgtcggcaaagaaatgaaaccgcttggcgatacatttatcaacgctgttaaaatggtgattgcaccaattattttcttcacaatcgttctcgggattgcaaaaatgggcgatatgaagaaggttggaaaagtagggggaaaagcgtttatctatttcgaggttgtcaccaccctcgcactcattatcggtttatttgtcgtcaatattatgaagccgggtgcgggtcttgattacagcaagcttgaaaagggtgatgtatcacaatacacgcaaaatggcggtcagggaatcgactggattgaatttgttacacacattgttccatccaacatggttgatgccttcgcaaaaggggacattttgcaggtcttattcttttctattcttttcggagtgggtcttgcggcattaggcgaaaaaggaaaaagcgtcattgatttcttcgacaaggtttctcacgtttttttcaaaattatcggctacattatgcgtgccgcgccaatcggggcattcggggcgatggcgtatacaatcggacacttcgggctcgattccatcaaaccgctggcaagcttaatgatgtctgtttatattacgatgttcctgttcgtatttgttgctttaaatatcatctgcaagctttacggattcagcctgtggaattaccttcgcttcattaaggatgagcttctgatcgtgcttggcacaagctcttccgaatcggtgcttcctcgtatgatggataaaatggagcgctacggctgttccaaatccgttgtcgggctagttattccgacgggctattcgtttaacctcgacggcacatccatctatttatcaatggcgactgtctttttggcacaggtgtttggggtagacctcagcatcggccagcaaattacgattatcctcgttctgatgctgacatcgaagggagcggcaggtgtgacgggaagcggatttatcgtccttgcctcaacgctgtcagcgctgcaggtcatcccgctggagggtcttgcactcctgctaggggttgaccgattcatgagtgaaggaagagccattgtgaacctgatcggaaacggaatcgccacgatcattgttgccaaaagcgaaaatgaatttgatgaagcaaaaagcgtagaggctgtggaaggcatgaaaaaaatgaaaacagcagtctgaaaaaagaacggcccatccatggggccgtttttttaattgtttaagaattattaaggtaaggacagagacctcagcatttttttgttatataatttacaaatggatactatattgaatgaaggacgtttgtcctaacaggagtgtataaatggccgctttagttaaattttttcagcacccgggagtaaggcgtttctccatctttgtcgtgttaactggtgtgttatatctatttaagagcatgatcaacttaatattgcttaccttcattttcacatttctaatggatcgtttggagcttgtcgtgcggcagtttgtaagccagttcttccgcgtgagccagcgggttgtcattacgtttctttacatgttgctggctgtgctgcttacagtcgggggctttgtgttttatccggtcgtcgcggcacagatccagcagctggtaaagcagattaaacatattgcgtatcatcctgacagcatccctttctttgatgagatcaccagtgtcttcggagatattaacatcagttcatatgtcaaagagggcttcaatgtagtgtatacgtatctggccgatatcagcacattcggcttgcaggtcgtgatggcgctcattctcagcatgtttttcttatttgagaaaaaacggctttctgaattcatggcgaaatttaaaacgagcaaactgagggtcttttatgaggagattgcttttttcggaagcaaatttgcaagaacgttcggcaaggtgctcgaggctcaatttatcattgcgctcgtcaactgtattctgacgtttatcgcgctttggattatgcattttccgcagctgtttgggctgtcgattatggtgttcttccttggattgatccctgtagcaggcgtcgtcatttccctgattccgctcagcattatcgcctacagcactggcggtggaatgtatgtgctctacattgttcttgtcatattcgccattcatgcgatcgaaacctatttcttaaatccgaagctgatgtcggcgaaaacagagttgccaatctttttcaccttcacagtactcattttctctgaacacttcttcggcatttggggtttaattatcgggattccgatctttgtgtttctccttgatattctggatgtcaccaacaaggaagataggtctaaaggtccccgagagaatagcgataaaaagtagtttaaaatcgaataatgagtgtgcctcgatctgccggcctgcctgttcagggcatggaattaagactcggaatcggagtttggcattgcttcgcacagtggtgaacacaacaggtgacaatgcctgtcatcattacagaaactgaaaagaacaaacagtcggagcaaacgctcatcatcggtttaaccaaacatttggaagcaacaaatgctataatacaaacagtgcctaatgttgggcactgtttattttttgtcgaaaaaggaggaaggctttatggctgagccgattttacatattgaaggcctcgataaaaagattgggtctaaacagattttaaaacagatcagcatggacgttatggagggcgaaatcatcggcctgctcggtccaaatggttccgggaaaacaacactcatccgtatcatcgtcgggctgctgaaacaaaacagcggaagcgtgacaatcagcggattccagcatgatacagagtttgaaaaagcgatggaagcggttggagcaattgttgagaaccctgagttctatccgtacctgacaggctgggaaaacctcaagcactttgcgaatatgcacaaaaaaatagcggatggacggcttgatgaagtggtagaacgtgtcgggctgacgtcagcgattcatgataaggtgaaaacctattcccttgggatgcgccagcgtctgggaatcgcccaggcaattcttcaccggccgaagcttctcattctagatgaaccgacaaacggactcgatcctgcggggatgaaggattttcgcaatcatgttaaggaactcgcagaaatggaaggaacagctgtcctgttcgccactcatttattgcgcgaggttgaagacttgtgcgaccgtgtcatcatcattcaaaaaggtgagatcaaagcggaagtcagcttacaaggaactgatcaaaccacagaaaaagcaattatagaagtgcagccgcaagaaaaagcgctcaattggcttacaggcaatcaatatcaagctgagagccaagacgggacgattgtagttgaggtggcaaaagaaaacataccggagctgaaccgatcacttgtcggacaagatctgaatgtattttccattacgccttacacgcagtcactggaagacgaatttataaaagcgacaacagctcatcaagaggagggagaagagcttgtctaaattaatttggaatgaacatatgaaactttttaatcggaaggtcactttggtttctcttatcctgatggctgtctttcaattcttcatggcattgatcattaaacggattgtcatcagtgccggaacagatgaaaacttcatcggctatttatcgtatacaccgagcctgaacattttgctgcaggctttaacgatcgtaattgcagcaacaattgtttcgatggaatttgataaaaagacgatcaaatttttgctcattcgtccggttaaacgccaaaaggtcttttggtcaaaattaatcacagtcgtgatggtcagcttctatttgtatctggcatactacattctcgcattattattcggtctcgtgttttttggcacatcggtgactgcggaatcaaagacattgctggtcaacaccttggcgctgatcgggtcaaactggcttgaagctgtaatgatgggattattcgggctgctttgttcttcgctgttccgcaacagcgcggtagcagttgttgtttcttttgtcgttttatacggagcgagtacacttgttcagctcatgaagttgtttgaaaacaagtggggcagctttttgctttttgcgaacactgactttacgcaatacagaagcggagagacagcgttgttttcaggcatgacgccattgttttcaattggaattctcatcatacatgccatattcttcatcgttgttggctggtggtgcttctgtaaacgggatgttcgggtctaaaggcaaggaatgacatttttgtgaaaaagctcacgtaaatcaatatcatttgatattttggtttatactaaaggtactgacggaggtgtctcgattgaggaactttattaccgctttaccgatcatattgctgcttggattctcatttgtgtctttcatgtttcagtttgaacatcttgtttatttcaggctcgcgcttgggttgttttctctcgtgggactgtacatgatatataaaatgaagacgggcatccgctattttatcatctatctgtatgccagctggattgtgttggccgcagtgaccgcttttgaagagccgattttctcaagctttttctttggcggcctggtgatgaccatgggttacctgacatatatgctgatttatctcggcatgaaacaagaccgggatgcaaatcctgtgtaatcgcgctgttcccttggggaacggcgtgtttttctatactgggcaaaaggttaacagttgcggaaaaatggcagggaatctataatacatattaaatttatcggaattaaaactggggggctgccggatgtcattatttatacaaaacgatcaacagcggcaatggatggagaaaatcggacggattgcggatgaatttcagcaaacagctgctgaagatgacgaacagggacgttttcctgcagagaaaatacaaaaactgcgtgatgctgggtatacagcattaacattgccggcatctcatggcggagggggcatttctgtttacgatatgctcctgtttcaagaacggcttgcacggggagatgcttcgacggctcttagcatcggctggcatttgagcgtgatcggggagcttggagaaggcaacagctgggatgaagacgtatttgcatttgttgccaaggaagtccaaaacggagccgtcattaacagggcggcgactgaagcgaaaaccggaagcccgacaagaggagggcgtccgggtacacacgccgtcaaaaaggatggcaaatgggcagtgaacgggagaaaaacctttacgacgatgtcacaagctctggattattttttagtaaccgcatggattgaagacaaacaaacaacaggcgtgtttctcattcataaagatgatcccggcttgtcgattgaagagacgtgggatatgatggcgatgcgggcgactgggagccatgaccttgtactgaacgaagtaatgcttgatgagaataagctggtggaactgcttcaagggcctcgtggagctaagccgaatggctggctgcttcacattcctgcgatttatcttggtgtggctcaagctgctcgtgactatgcagtgcaatttgcatctgagtattctccaaacagcttgaatggaccgatcaagaatgtcccggccgtacagcaaagaacaggcgaaatggagcttgaactgctcaatgccagacactttcttttccatatcgctcaattgtatgacgatccggagcggcgtccacacttgaccagcgagctcggtgcggcgaaacatatcgtcacaaacgctgcgctgtctgttgttgataaagcgatgagaattgtcggggccaaaagcctgggacgaaccaacccgcttcagcgctattaccgtgatgtgcgcgccggtcttcacaacccgccgatggatgacgccgtgatacacaagctggcagctgaagcgtttgagtcataaaaaaaagagccttaccggctctttttatgtattgttttgctcttgcagatttttttgatgcttgcggtcaattctgtcataaataacgttcatcagctttggattgcccataatcgcctctttgttttcctggatcagctgttggtaagttttcactttacgcttcggcatgctccggcgccctcctgacatgtttgtattcactttctaactccgtcagcgacaattcatacagatgacgctttgactttttgtatataccattctgtattaacagatgaatgagctgtttttttctgatttctgcagactgaggtgtcattgtgtcaccaacctccaatcaaacgatattgataatcattatcaattaacttcagtatacaatgtccgcaatagcctgtaaagatgaaaagagtcctattctttctccaatttacaaacattcaacaaatcgacaaaaagtttcccgggcaataatttgctgtcgaaatattccgcttcattgaacgcaccctgctatttttcatgttttgaaccatactatgtaatagaatggaggctggtattcaatggagcggacagaaaatctgaaaaagggagaaaaaggggcgctcctcaatatttttgcatatgtcatccttgctgttgtaaagctagttatcgggattctatatcattctgaagcgctgagagcagacgggttaaataatggaacagatattgttgcgtcagtagcagtgctgataggattgcggatttctcaaagaccggctgacagcgatcatccatacggccattatcgggctgaaacaatttcgtctcttgttgcgtcttttattatgatggcagtcggcattgaagtgttaatcggcggaggaaaagcgattgcgggcggcacaacggaaacgccaaatcttatcgcggcatggacggcgttaggcagtgctgtgtttatgtatggcatctatttatataacaaaaggctggcagcgtccattaaaagctctgccctgatggcagcggcaaaggacagcaggtcagacgcttttgtaagtgccggcgcgtttatcggtgttttttcgtcccagctgaagctgccgtggattgatccggtaacggcttttatcatcggcatcatcatttgcaaaactgcgtgggatatctttaaagacgcttcacattccttaacagacggcttccatttaaaagatcttgagccttacaaacagaccgtcggcaggatcgaaaatgtgcatcgcctaaaggatgtgaaagcgaggtatttaggcagtacagttcatatcgagatggtgattacggttgatccgaagcttacagtagaagaaggccatggagtggcggatgaagtagaagacaaaataaaacatgaacacgatgtcactcatgttcatgttcatgtagagcctgacgacataaaataaggctgtttaacgaattagcttatatgttcagataaaaattcagtcacttcttcaggcgttttggcattggcgctgtgaaggtgagctgttttttcaccgttcttgaaaataagcaggctgggaatgcccattacttggtatttttcagccaggtcaggaagctcgtccttattcagctcataccaatcgttttgattgtattcttccaaaatatcgccgatgaacatattcatgcgtgtgcagtctgggcaccaatcagcataaaactttacaatgatttctttatcggattgaatcagttcattaaattgttcgtttgttgtgatttttttcatatgtcacatctccttttcaatgccattttaatataaaataaaaaggaattacatacaaatgcattcaacatcagcatgcccaaaaataattagatcattttccggtgaaaatgataagatagtaaagatgaattgtagtgggggagtatccattgaaaacaagtctaggattagtgtacggaggaaagtcggcagaacataatgtttccctgcagacggctctggctgtaatcaaagcgctaaatactgagaagtttgatatacatccgatttatataacagaaaaaggcgaatgggtaagaggcgctcgtttaactgagcctgtttcaaatgtgaaaatgcttcaatttgagcaaggaggcagtgctttttctccagctgccctgaaccaggagatgtttccgcaggaagcgtcacagcaaaatgaagccatcgacgtcgtattcccgctcctccacggaccgaacggagaagacggtacgatccagggaatgctcgagctgttgaacattccttatgtcggcaacggagtgcttgcttcctcagccggcatggataaagttgtcatgaaacatttatttgctcaggccggccttgctcaggctaaatacgcagctttccttaagaaagactggactcgttctccgaaagaaagctgtgagcaggttgaacaggaattaggctacccttgcttcgtaaaaccggcgaacctcggctcaagtgtcggaatcagcaaatgccgaaaccgtgaagaactgcaaaaagcgtttgagcttgctttccaatatgaccgcaaagtcgtcgtcgaagaaggcattaacggccgcgagatcgaaatcggcgttcttggaaatgacgatcctaaatgctctgttgtgggggaaatcgcaccgaagacggatttctacgattacaaagcgaaatatgaggatggagatactgatctgatgattccggcgattgtgactgatgaggaatacgcaacaatcagtgatatggcgatcaaagcatttaaagcgatcgacggttcaggactcgtcagagcggactttttcctgacagctgacggcgaagttctgatcaatgaagtcaacacaatgcctggctttacacctttcagcatgttcccgctgctctggaaagaagccggagtggaatatgctgacctgattgaacagcttgtggagcttgcaaaagaacgccacgctgaaaaacaattgattaagcatacattctaatgaagaaggacactgccggtaaaagggcagtgttttttcccgtatatacaaaagaaagagagggaccttacttgattaagcgaacagtaaaaaacattgccgaaatggttaatggcacactaacaaatccgcaatatgaacaaacagtcattcatggagtggcaaccgatacaagaaaactggaacaacatcagctcttcattccgctgaaaggggaacgttttgacggccacacttttgtggagcaggcttttgaagctggtgtagcggctgttctttgggatcggtcagaaccaaatccgcccgagaatcacgccgtcattttagtggacgatacccttactgcacttcagcagcttgcaaaagcctatttgcaggagcttggcacgcgtgtcatcggagtaaccggaagcaatggcaaaacgacaacaaaagatatgattcacgccgtattggggacccagtaccgtgtccacaaaactgggggaaacttcaataatcatatcggtttgccgctgacggttttagcgatgcctgaaaatacggagatcgccgtattggagatgggaatgagcgccaaaggagaaattgacctcttgagccgactggcaaacccggatgcggcagtgattacgaatatcggcgaatcgcatatgcaagaccttggctctagagagggcatcgcggaggcgaagcttgaaatcattaacgggcttaaagaagacggagtgctgatttatatcggggacgaaccgcttcttcaaaatgcatacagctgccagacgaaaacgtacggtacgggagcgcataatgattatcagcttcaggatgtcagccagagtgaggaaggaacccattttacaatcaaagggataaaaaacacgttttttattccaatactcggcaagcacaatgtgatgaacgccatggcagcgattgctgcaggagcttattttggcatcacgcctgagggtgcggcaaaaggactgagcggcctaaaggtaaccgggatgagacttgaactcatcaaaacagacagcggcctttcgataatcaatgacgcttataatgcgagcccgacttccatgaaagctgcaattcaattgacagaaagcctcgaaggctacggcaaaaaaatgctcgtgctcggtgatatgcttgaactcggcgatcttgaagaaacgttccataaagagtgcggcgctgtgatcagccctgataaaattgaccgcgtctttacgtacggaaaactgggagcttttatcgcggaaggcgccctgaaacactttgagaaagaccgcgtcagccattacactgagaaaaaagatctcctccaagctgtgaaggaaaacgcatcaaaaggcgatttgattttattcaaagcgtccagaggtatgaagcttgaagaaatcgttaaagatttaatagagagcccgctttcgtaagaaaatattttgcgaaaaaacgcatattgcatcataaaataacatgatgtgcaaacactaatgtatgccggccgaaaattatgtatatctggccggctgcggctatgatacaatatatataggttatttcgcgatacgaacatattcgtccggacttttcatcgtgacccgaagttctccgctggattcttgggagcggatggagcagcagccggcatattcgagatgccgatctgcttctcatcttattgaaaaacaaatagtgtaatggtaagataaaacttaaagtaattcgggctttgtatacggatggatcctgtccttcttgtctaaagggcagttttataagtggtaaatcacgacattactgaaacagcaattagaaggagtttgaataatttgactataacgtttcaagattttaatttaagttctgatctcatgaaagcaattaatcgtatgggatttgaagaagcaacaccgattcaggcacaaacgataccgctcggactttcaaataaagacgtcattggacaagcgcaaacaggtacaggtaaaacagctgcgtttggtataccccttgttgaaaaaattaaccccgagtctcctaatattcaagcaatcgtaatcgcgccaacccgtgaattagccattcaagtatctgaagaattgtataaaatcggacaagataaacgtgcgaaggttcttcctatttacggcggacaggatattggacggcaaatccgggcgttaaagaagaatccgaatattattgtcggaacacctggacgtcttcttgaccacatcaaccgccgcaccattcgtttaaacaatgtaaatactgttgtaatggatgaagcggatgaaatgttgaacatgggattcattgatgatattgaatctatcctttcaaacgtgccaagcgagcatcagacacttctgttctctgccacaatgcctgcgccgatcaaacgcattgcagagcgctttatgactgagccggaacacgtaaaagtaaaagcgaaagaaatgacggtttctaacattcagcagttctatttggaagtgcaagaacgcaaaaaattcgatacactgactcgccttcttgacattcagtctcctgagcttgcgatcgtattcggacgtacaaaacgccgtgtcgatgagctggctgaagccctgaaccttcgcggatatgcagctgaaggtattcacggtgacttaacgcaggcgaaacgtatggttgcgcttcgtaaatttaaagaaggcgcaatcgaagttctagtcgcaactgatgttgccgctcgcggacttgatatctcaggtgttacacacgtatacaacttcgacgtgcctcaagatcctgaaagctacgttcaccgtatcggaagaacgggccgtgcaggaaaaacaggtatggcgatgacgttcattacaccgcgtgagaaaagcatgcttcgcgcaattgaacaaacaacaaaacgcaaaatggaccgcatgaaggagcctacacttgatgaagcgttagaaggccagcagcaggttactgttgaacgtcttcgcacgacaatcagtgaaaacaacctgaacttctacatgacagcggcagctgagctgcttgaagatcatgatgcagtaacagtggttgcggcggctatcaaaatggctacaaaagagccagacgacacaccggttcgcttaacagacgaagcgccgatggtcagcaaacgctacaagaaccagcgctcttctaaacgcagagacggtcaaggcggcggctaccgcggcggaaaagggaaaagcaacaaccgttcttcctatgacaaaaagcgttcaaacgatcgccgttcttcaggtgacagacgccagaaaaaatcttactaatttgatcgattcagagcccaaaacatgatgttttgggcttttttatgttcgcgatttgttattcagcaaattttcagctgacggaagccatttttctctgtatgcttaagaatgaaacctttctgtaaaagagacgtataaataacgacgaaaaaaagggaggtaggtatttttgagagagcagccaaaaaaccaaatcagtccagacggattaaaggtttggcgacttcaagagatcatcatatccgctgtttgcttacttattgtcattgcagttgcagtgttaagctattattttcattggccgtactggatcagcggcgtgctcggcgcggtttggctgttgggatcgattgtgacggtctttatcattccgaaggtccgtcataaggtgtggcgatatgaagtccatgaacatgaaatagatattcagtcaggtatttttgtggtaacacgtgtgattgttccgatggtcagagttcagcacgtcgatacgtcacaagggccattattaaaaaaatacaacctggcaacggtgaaaatttccacggccgcgaccgttcattcgatccccgctttagagatggaggaagcggatcggctgagagactccatttcccgtctggcgagggtgactgacgatgatgtctgaaccgaaacgcctgcacccggcagcagtcattttgaatttatgccataccattattcaaacgataaaaaatatcattctgccattcttttttgtgtatattgtcaattcaaaccatactgtccgtttttacggagccattgcgctcggtgtgctattcatctggcttgtagcggcaagcattatcaaatggagaaggtttacctatcgaattgaagatgatgaatttagaatcgaagaaggcttatttgttacgaaaaagcgatacatatcgattgatcggattcaaacgatgaatacgagcgcaggccttgtccagcaaatctttaagcttgtgaagctgcaaattgaaacagcaggcggaggcaaggaggcagaagccgttctttctgctatttctgttgaagaagcggaacgcatcaaagaagctgtctttaagaaaaaagcgcaaagacgagaaaatgaacttgatgaagaacggcttgaagctgaagaggagttggttccggccgttgaggtgcaagagcactatcgcatgaacgcgaaagaattgctcatggccgcttctacctccggcggaatcggagtcattatctccgctgtatttgcacttatttcccagcttgatgaagtgctgccaatggattggttattcgataagttttccttccttcagcacgccagcatcggtatttacgcggtactgatttttatcggtttatttatcgcctggattttcagcatcgcgggcatgatgtttagatacgcgaactttcaaatcataaaaaaagagcaggaactggtgatttcaaggggaattattgaaaaacatcaagtcacgattccattgcgaaaaatacaagccattaaaatcaaagaaaatatcattcgccagcttttcggctttgtaacggtgtccatcgtcagcgcaggaggcggcgaccgggaaaaagaagaaggcgctttgaccattctctttccaatgattcataaaaaaaagcttccgcacatgctccgaacatttacgccggaatacacgctggaagaaaactgccgccgcctgccgcggcgcgcgttgaaacgctatttgttccgttctgtcattttttcactatttttgatcatcccgttatgtatcttctttcagccatggggctatctgtcagccatcctgctgccgatagaattgttcttcggctatctcgcgtataaagaggctgcatggacgatcaacggggaccgtcttcagctgacgtctagatttataggcagaacaaccgccattgtactgaaaaaacgaatgcaggtctgcaagttcagccaatcctatttccaaaagaaaggccgcttgtataccatttctacttcggtgaaatcatcgagccatatggaagaattaacggtgagggatgtaggtgaagaggatgcagccttcattttaaactggtactcatatgaaaaagcggacggttaataccgccgctcttttttttgcacgcataaaaacgaaagaagaaacccgccgcatagtccaaacagatgggccatcatgttaatattggagttgataaacgacatgagaacggcaaatgcgagcagtgtgatgatcattttggaatgctcctgccctattagttcattgcgaaaaagaaccataaacaggtacacgccgaatagcccgaaaattgcgcctgaagcaccgacatgcacgtaatcaagcggctctgtaacataagtgccgatattgccgatgatgccggagccggcgtatacaagaagaaaacgcgcttttcccagcatgcgttccaaagccggggcaaataaaaagatggacatggaattaaacagcagatgtgtgaaaccggcgtgcagcaaaatcggtgtgatcagccgccaccattcaccgtttgcgacacctagattatagcctgtgacggtatccctccataacacaactgaatgggcaggaagtgaaaaaaacagccagagaacagcttgcaaagccaatataaaggtgacaacggggtaaagcctgataaatgtttgaaaattttcagtccgtataaacattccgagccccttttcttcattttggtatatctatagtaacacgtttatgagacaaaccatttaaatagtacgtacgcaaaggaggttatcatacatgatttacggcattgggctggacattaccgagcttaaacggatcgcctctatggctggacgccagaaaaggtttgccgagcggattttgacgcgaagcgagcttgaccaatactatgagctttcagagaaaagaaaaatcgaatttctcgcgggcagattcgcggcaaaagaagctttctcgaaagcgtttggcaccggcattgggaggcagctcagctttcaggacattgaaattaggaaagaccaaaatggcaagccctatatcatttgcacgaaactgagccaggccgccgttcacgtatcgatcactcatacaaaagaatacgctgccgcgcaggttgtgattgaaaggttgtcaagctagtctgcatattagggaaaccccactcatatatttgatagtgcattaagggagacaagttgtttgaggcttttatggtacgcatctgttctgcctaaacgtgtaccgagcgtaccgttaaagtcaaacaagcgatttcttccttttacatcaattgagaaaaaggggttgaaaaaggtgagaaaaagctttgttttgcttttaacgggactgcttgctgttcttattctttctgcctgcgggcaaaaaacacagcaagatattgtggccgggttagatgaaaaggcgaaagaatacacctcgtacaaagcaaaagcgaaaatgaccatcgagacagggagtgagcctcaagtatacaatgtggaaatctggcacaaaaagccgtctctgtacagggtttatttagaaaatccgaaaaaggaccaaaatcaagtcattttacgaaatgaaaacggagtattcgttctcacgccgtctttaaataagagcttcagatttcaaagcgattggccgaacaacagcagccaggtttatctgtttgaatcgctcgtaaaggatgttcaaaacgattcggatgcagttttcacagcgaaagaaaagaaatacgtattcgaaacaaaaacaaactatcagcataacaaaatgctgccgacgcaagaaatcacatttaacaaaaaagatatgagcccgtcatctgtcaaagtgatggataccgaccggaaagtgatggtcaaagtagaattcagcagctttgaatttaataaacaatttgataaagaatcatttgatgaaaagaaaaatatgaccctttctcaaatggatgtcgccacaagcgcgaagccttccgatacatttgcggtcaaaacgccgctggaactgccgcttggcgtcaagctgcttgaagaaaaagatatatctactgaagacgggaagcgcatcatcatgacgtacggaggagaaaaatcatttacgttaattcaggaaaaagcccagattgccaaggcttcctcctccgttacgctgaacggcgaaccggtaaatctcggctacaccatcggcgccttgtcggatgcatcattgtcatggacatatgaaggcgtagattaccttctctcttctaaagatctttctaaagaggaaatggtgacagtagcaaaaagcatgcagggacaatcatcgaaataacaacaaaggccaaacatgatttggcctttttttcgttagacatcgtttccctttagcctttaattttagtatgatatgtaaatgatattgaataaaagctaggaagtgtcgtaatgagcacaaaacctttttacagagatacgtgggcggaaattgacttgtccgcgataaaggaaaatgtcagcaatatgaaaaaacatatcggtgaacatgtccacctgatggcagttgtgaaagcaaacgcctacgggcatggtgatgcagaaacagcaaaggctgctcttgacgcaggtgcttcatgcttggccgtggctattttggatgaagcgatttcactgcgcaaaaagggcttgaaggcgcctatattggtgcttggcgcggttcccccagagtatgtggcaatcgctgctgagtatgacgtgaccttaacaggttattctgttgaatggcttcaggaggcagcccgccacacgaaaaaaggttctcttcattttcatctgaaggtcgatacggggatgaacaggcttggtgtaaaaacagaggaagaagttcagaacgtgatggccattcttgaccgtaaccctcgtttaaagtgcaaaggggtatttacccattttgcgacagcggatgaaaaagaaagaggctatttcttaatgcagtttgagcgttttaaagagctgattgctccgctgccgttaaagaatctgatggtccactgcgcgaacagcgccgccggactccggctgaaaaaaggcttttttaatgcagtcagattcggcatcggcatgtatggccttcgcccgtctgctgatatttcggacgagataccgtttcagctgcgtccggcatttaccctgcattcgacgctgtcgcatgtcaaactgatcagaaaaggcgagagcgtcagctacggagccgagtacacagcagaaaaagacacatggatcgggacggtgcctgtaggctatgcggacggctggctccgaaaattgaaagggactgacatccttgtgaagggaaaacgcttgaaaattgccggcagaatttgcatggaccaatttatggtggagctggatcaggaatatccgccgggcacaaaagtcacattaataggccggcagggggatgaatatatttccatggatgagattgcaggaaggctcgaaaccattaactatgaggtggcctgtacaataagttcccgtgttccccgtatgtttttggaaaatgggagtataatggaagtaagaaatcctttattgcaggtaaatacaagcaattaacttacctaaatggagaattcataaaacagctttgcttgaagagtgaataatggtatcattatcactggatggataaaagagtcgtatccgtaagtttggtggaggtgtatgttttttgtctgaatccagcgcaagaaccgaaatgaaaatcagcttgcccgaaaacctagtagctgaattggatggtgtagcgatgcgggagaaacgaagcagaaacgaactgatatcacaagcagtgagagcgtatgtcagcgaacgaacaactcgtcacaaccgtgatttgatgagacgcggctatatggaaatggcgaaaatcaacctgaatatttcttctgaggctcactttgcggagtgcgaggctgaaacgacagttgagcgcttagtcagcggaggataatcatttgattgtgaaacgcggcgatgtttattttgctgatttatctcctgttgttggctcagagcaaggcggggtgcgcccggttttagtgatccaaaatgacatcggaaatcgcttcagcccaactgctattgttgcagccataacagcacaaatacagaaagcgaaattaccaacccacgtcgaaatcgatgcaaaacgctacggttttgaaagagattccgttattttgctggagcaaattcggacgattgacaagcaaaggttaacggataagattactcatctggatgatgaaatgatggataaggttgatgaagccttacaaatcagtttggcactcattgatttttagacatatttgcaggttgctcaaatagagcaactttttttgttttcaaaaaacataaacgatataatagtgaaataacgaaaaaatatgttgttttttattgggaggtaagcgaatttgatgtcgaaccagactgtataccagttcattgccgaaaatcaaaatgaactgctccaactgtggactgacacactaaaagaattaagcgagcaagaatcctatcagctgactgaccaagtgtatgaaaatatatctaaagaatatatcgacattctgttgctgtctgttaaggacgaaaatgctgctgaaagccaaatcagcgaactggcgcttcgagcggtccaaatcggactgtctatgaagtttttggctactgcgtttgctgaattctggaagcgtctctacacgaaaatgaatgataagagattgccagatcaagagagcacggaattaatctggcagattgaccgctttttcagcccgattaacacagaaatttttaatcaatactcaatctcatgggaaaaaacagtatctctgcaaaaaatcgcgctgcaagagctgtctgcgccgcttatcccggtgtttgaaaatatcactgtgatgcctcttgtcggaacaattgataccgaacgcgcgaaacgaattatggaaaaccttcttaatggcgtcgtcaaacaccgttcccaagtcgtgctgattgacattacaggtgtccctgtcgtcgatacgatggttgcccatcatattattcaggcatcagaagctgtaaggcttgtcggagcaaaatgcctgctggccggaatccgcccggaaattgctcaaaccatcgtcaatttggggattgatttatcccaagttataactaagaataccctgcaaaaaggaattcaaacagcattggaaatgacggatcgaaaaatcgtttcattgggggaataacattttgagacatccgaaaatcccgatcttgaaactgtataattgcttattagtgtccattcagtgggaacttgatgaccaaacagcattaacctttcaagaagacttattaaataaaatatacgaaacaggtgctaacggagtcgtcattgacctgacatctgtggatatgattgattcatttatcgcgaaagtgctgggcgacgtcattacaatgtctaagttaatgggggctaaagtcgtcttgaccggcattcagcctgctgtggcagtgacgctgattgaacttggaatcgcacttgaggaaatcgaaactgcgctcgacttagagcaggggcttgagacattgaagcgggaattgggggaatagcgaatgaacgaccaatcctgtgtaagaatcatgacagaatgggatattgtggccgccagacagctgggacgaaacgttgcgaaagaactgggtttcggcacggtagaccaggctagaattacaacggctatttcagaattagccaggaatatttatttatatgccggcaaagggcagattggaattgaacaggtcgcagacagaggaaaaaaaggcctgaaaattatagcggaagaccaagggccgggaattcctgatatccgaaaagtcatggaagacgggttttcaacgtctggaggacttggtgcgggacttcccggggtcaaaaggctgatggatgaattcagcttaaattccgtagcgggggaaggaacagagatacaagccatcaaatggcttcggtaggaggtaagaacgtggattttagggaggttattgagcagcggtatcatcagctgcttagtcgatatatagccgaattaacagaaacatctttatatcaagcccaaaaattcagccgaaaaacaatcgagcaccaaattcctccggaagaaatcatcagcgttcacagaaaagtgctgaaggagctgtatccaagtctcccggaagatgtgtttcattcgctggattttttaatagaagtcatgattggctatggaatggcttatcaggagcatcaaacccttagagggatacagcaggaaatcaaatcagaaattgaaatcgcggcaaatgtccagcagacgcttctcggaactaaagttcctcaggaggaagcgctggatatcggcgccatcagtgttcccgctaaacagatgagcggtgattactaccactttgtcaaagacaaggaatccatcaatatcgcaatcgcggacgtgatcggaaaaggcattccagcggctttatgcatgtccatgattaaatacgcaatggactctttgccggaaacgggcatacacccttctcaagtgctgaaaaatttgaatcgtgttgttgaacaaaacgttgatgccagtatgtttattacgatgttttatgcgaattacaatatggacaagcatcaatttacatatgcttcagcgggacatgaaccgggattctattattctcaaaaagacaacacgttttacgatttagaggccaaaggactcgttctcggcatctcgcaggactatgactacaaacaattcgatcagcatctggaaaagggcgatatgattgttttattttctgacggcgtcacagaatgcagaacggaaaacggtttcttggagcgtcctgatctgcagaagctcattgaggaacatatgtgttcctccgcgcaggaaatggtcaaaaacatttatgacagcctcctcaaattgcaggattttcagcttcacgatgattttacgttaattgttttgcggagaaaggtttaacgtctgtcagacgagggtataaagcaactagtgatttgaaggaaaatttgaggtgatacgaatgaatataaatgttgatgtgaagcaaaacgagaatgatatacaagtaaacattgcaggagaaattgatgtatactcagccccggtgcttagagagaagctcgttcctctggcagaacaaggagctgacttaagaatttgcctgaaagatgtcagctacatggacagtaccggattgggcgtttttgtagggacctttaaaatggtgaaaaaacaaggcggttcgctgaaacttgaaaatctttctgaacggctgatccgactgtttgacattacaggcttgaaggacatcattgatatttctgcaaagtcagaaggtggagtgcaatgaagaataatgctgattacatcgaaatgaaagtgccggcccaacctgaatatgtgggaattataagactgacgctgtcaggggtcgcaagcagaatgggctatacgtacgatgaaattgaagacttgaaaatcgcagtcagtgaggcgtgcacaaatgcggttcagcacgcttacaaagaagataaaaatggggaagtgtcaatacgattcggtgtgtttgaagaccgtttagaggttattgtggcggatgaaggagacagctttgactttgatcaaaagcagcaggatctagggccgtacacaccttcgcacacagttgatcaattatcagaaggagggctcggtctatatttaatggaaacgctcatggatgaagtcagagtgcaaaaccactccggcgtcaccgtagcgatgacaaagtatttaaatggggagcgagttgatcatgacacaaccatcaaaaactacgaaactaactaaagatgaagtcgatcggctcataagcgattaccaaacaaagcaagatgaacaagcgcaggaaacgcttgtgcgggtgtatacaaatctggttgacatgcttgcgaaaaaatactcaaaaggcaaaagcttccacgaggatctccgccaggtcggcatgatcgggctgctaggcgcgattaagcgatacgatcctgttgtcggcaaatcgtttgaagcttttgcaatcccgacaatcatcggtgaaattaaacgtttcctcagagataaaacatggagcgttcatgtgccgagacgaattaaagaactcggtccaagaatcaaaatggcggttgatcagctgaccactgaaacacaaagatcgccgaaagtcgaagagattgccgaattcctcgatgtttctgaagaagaggttcttgaaacgatggaaatgggcaaaagctatcaagccttatccgttgaccacagcattgaagcggattcggacggaagcactgtcacgattcttgatatcgtcggatcacaggaggacggatatgagcgggtcaaccagcaattgatgctgcaaagcgtgcttcatgtcctttcagaccgtgagaaacaaatcatagaccttacgtatattcaaaacaaaagccaaaaagaaactggggacattctcggtatatctcaaatgcacgtctcgcgcttgcaacgcaaagctgtgaagaagctcagagaggccttgattgaagatccctcgatggagttaatgtaatgatccaggttgaagaaaacgagcatattcaaactctagtatatcaactgaataaagaagggaaatcgatttgcggtgacagtttttttatgaaagctgatgataaggagttaatttgcgcggttgctgacggactgggaagtggatcacttgctaacgaatcctctgcagccatcaaagacttagtggaaaactatgcgagtgaagacgtagaaagcattatcgaacgctgtaatcaggcgatgaaaaacaaaagaggcgctacagcatctatcctgaaaatcaattttgagcaaaggcagtttacgtactgctctgtcggaaatgtacggtttattctgcattccccgtctggtgaaagcttttatcctctgccgatttcgggctatttatcaggcaagccgcaaaaatacaaaacgcacaccgccacctatgaaaagggttcaaagttcattatacatacagatggactcaacgtacctgatatccgctcccatttaaaaaaaggccaatcggtagaagaaatatcgaattcgctgaaaatgtatacgacatcgagaaaagatgacctgacctatattctcggacagctgtcctagagaataagaacaagaagaagccggaatgccggcttctttttttatgtgtttttttcggtttttgatacactagagacagaacgacaaaattggaggctttggttacatggaaacgtcagcccttttaaaacagcaaattgcgaaagaaataggtttatcacaaaaacacgttgaaagtgtcatccgcctgcttgaggacggcaatacagtcccgtttattgcccggtatcgaaaagagcagacgggttcaatggatgaggttcagattcagacgatttctgaacgctggcaatacatacaaaacctgaatcagcgaaaagaagaagtcatcaggctgatcgcagagcaggataaactgacagatgatctaaaacgtaaaatcgagcaatcggtgaagcttcaggaagtggaagacctttaccgcccttataaacaaaaacgtaaaacaaaggcgacagtcgccaaaagcaaaggccttgagccgcttgccgactatatcctgacacttccccaagatgatcgtctggcagcaactgcagaccaatacatcagcgaagaaaaagaagtgtttacgcgagaagaagcgattgaaggcgccaagcacattattgcggaacaaatttcagacgagccgaccttcagaaagtggattcgccaggaaaccttcaaaagaggaaccattaagtctgcagcaggaaagtcggcagacaccgatgagaaaaatgtgtatgaaatgtattacgagtatgaagagccaattgcaaaagtcgttccgcatagggtgctggcaatgaaccgcggcgaaaaagaagacattttaaaggtagcgattgaaccgcctgcggatcacattaaggcgtatttagaaaaacaagtcatcaaaaatcgctcaacatccgtaagagagattttgcaggagacaattgatgacagctataaaaggctgatccagccggcaatcgagcgtgaaatcaggaaagagctctcagaaaaagctgatgaacaggcgattcatattttctcagagaacttgagaaaacttcttttgcagccgccgatgaaaggcaaaaccgttctcggtgttgacccagcctttcgaaccggctgtaagctcgctgtgtcagatgagactggaaaagtcttgaaaattgatgtgatctatccgcatgcgccagtcaacaaaacaaaagaagcccatgaaaaagtgaaaaagattcttgagcagtatcaagtcgagatggtggcgatcggaaacggcacagcatccagagaaacagaacaattcatcgtcaatgtactgaaagacatgccgcgcaaaatttattatgtgatcgtcaatgaagcgggtgcaagcgtctattcggcttcagagctggcccgagaagaattccctgaccttaaggttgaagagcgcagtgccgtgtctattgcgcgaagacttcaagacccgctcgcggagctcgttaaaatcgatccgaagtctgttggtgtcggacagtatcagcatgacgtcagccaaaaacgcttaaatgaatctctgcggtttgtcgtcgaaacggtcgtaaaccaggtgggagtaaacgtcaacacagcctccgtcgcgctgcttcagtatgtagcgggattatcgaagtctgtagcaggcaacgttgtcaaaaaacgtgaggaaatcggaaagttttcaaatcgaaaagaactgaaggacatcccaaggttaggtgcgaaaacctacgagcaatgtatcggtttcttaagagtgcaggaagggacagagcctttggatagaacaggcatccacccggaaagctataaagaaacaaaagcacttttgaaaaaactcggactttcaacagaacatatcggcacggcggaattgaaggacaaaatcaatcagctggcgctctctgaaacggcaaaagagctgggaatcggcgaaatcactctgaaagacatttgtgaacagctgacaaggccggaacgcgatccgcgcgatgaggtgcctaagcctttgctgaaaacagacgtccttcagctggaagatttgaaagagggaatggaactgcagggcaccgtgcgcaatgtagtggacttcggagcgtttgttgatatcggagtcaaacaagacgggcttgtgcatatctcaaaattgagcaatcaattcgtcaagcatcctcttgatgtcgtatctgtcggcgatattgtgacagtttgggttgacggcgtagatgtacaaaaaggcagagtatcgctgtctatggtaaaataaaagcactgcttacgagcagtgttttttcctatagaaataccagcattgattcagcagtttaatttggtaattatctttttcaaggaacgctttttgcatctgctttttaagccaatttggcataggctcattcctcctcagcttttatcataagagggacggtgattaccatattgtatgcgaacggtgaattgtcccgttcaatgttttttaagtgaggtgcgctatggataatatagagcttcaaaagctgacagaggatatttctaaaacatattttaaaaagccgttccgccatcaggcgctttttaatgacaggcttaaaaccacgggcggaaggtacctgttaacctctcataacattgaattgaacagaaaatatctgattgaacacggcagggaggagctgatcggcatcatcaagcacgagctctgccattatcatctccaccttgaaggaaaagggtacaagcacagagacagagattttagaatgctattgcagcaggtcaacgcgccgaggttctgtacaccccttaagaaaaaagcggaaaacaaaaaaacttatatgtatatctgtacggcctgcggccaacagtatataaagaagcgcgccatgaaccctgacagatacagatgcggaaaatgccgcggaaaaataaaaagaattttttcgtgaaaaaggttgacgaatatggcaagcctatgttacattataaaagtcgtcacgagagataaataaaaacatttacctcttgacactgcaaatcaaggctgatataataagtcttgtctcattattccacagtagctcagtggtagagctatcggctgttaaccgatcggtcgcaggttcgaatcctgcctgtggagccatattggagaagtactcaagtggctgaagaggcgcccctgctaagggtgtaggtcgcgtaagcggcgcgagggttcaaatccctccttctccgccataagatttcgatataagttctcaaccatcggcccgttggtcaagcggttaagacaccgccctttcacggcggtaacacgggttcgaatcccgtacgggtcattccatttcgttgggctatagccaagcggtaaggcaacggactttgactccgtcatgcgttggttcgaatccagctagcccagccattttttattttttgaaatctaatagtaagagccattagctcagttggtagagcatctgacttttaatcagagggtcgaaggttcgagtccttcatggctcaccatttgtatttttgcgggtgtggcggaattggcagacgcgctagacttaggatctagtgtcttacgacgtgggggttcgagtcccttcacccgcactttatttacaaagtgcacgcaaatcggttttactaggttaagagcctactaaaccagcacaaacacaatttaatgatcacgcggtcgtggcggaatggcagacgcgctaggttgagggcctagtgggtgaataacccgtggaggttcaagtcctctcggccgcatcaatgataccaagggtttagagtaccttggtattttttgtatcttttgaacagaaggtattttgtgattaaaactgaccacttacctaaagtaagtggtttgatttgtccgcaaaagtatatagttaaataagataaaaaggacatagtatatcagcatacaaaatatgttatgcctttttttgttttaataacgcatccgttattttcagcgtacaatgttactttattatggaataaaaacaagtgtctgtaagcttgcttccatctgcggataaatcatcatttcttaaagtgccttcgaatacaaacccaagtttttctggaatagcacgacttttaaggtttgttgattcacatcttatttcaattcttctaaatttaatattgtttaacccaaaatcagctaatttttttactgcttctgtcatatatccattcccgccaaatttagtatttacccagtacccaatttcacatttaggaatggtccagtcaatcctctgaaggctagttattccaataaagttattgctagctttatcaaaaataagaaaacgaaaactttccctctttaaaaaatttatatgagcatttcttaaatttatctctgtttcttcaacagtaggaagttcttgagcaaatggcaaccaggcttttaattcattaaaggaacccctaattgcttggtttacaattttcccgtctcctgtttggtgtggtgctcgaaggattagtctttctgtttccaattgtaaaggcacatctaacaataaaggattcatttgatttctcctctcggaattttatattaaagaagcaaagtaatacaaaataaagctttatgacgtgcgcaaatttagttcaatttgcgtttaatcttctaaaagatattttcgtaactgacatcatatacctattgtgagaaagtcgatgataagtatcatgagatggaaggtatgccaataaacggtgaaaatgatcgtcttggcttatcaaagaaaacaccagactatgaagaagcaaaagatgaagagacaaagttaggagtaaaacgtgtgtttactcctcttttttaattcttgggttcattttcctcattctgggtgttcgattgggtgctcttttttcggtgaatttttttcctgtcaacatctccatttgacgtctagctctggccatttcagtaggaagaatgtaaatatattcaagtatcttatttgtaaatttaaataaaggctcaaccatagtactgttaaattctatatcatcaccatgagcagctgcattccctgcctctttaatcatcttagaaagaccgcccattaaaggtggtaaaattttcttttcctctaagtcgttaagttttgcatgaagcgttcttccaatagcccctttatttttacataccatttccaaagttcttctaagagccattaggcacaccatagcatcaattttccttacatttaaagctgactcataagcagatttaatgtttttaggtaagaggtttaaattcacctgttcactatatgggaacaaaacttgaccatctttataaatatcatcaccctcgttgtatacttcttcagtattccaatgagtatgatacagttgaaattcaaaacaaacaggacactcgaacacttcaaatatgtcattaaattgggcttcataagaggttaatggtacaaatgtttttttttcatatctgtttaacaaattcataggtgccttagttccacaatgtgggcaagtgagaattgtattttctgtcattttatctccctcaatagatttttcctcgtattataacactcttgtttaaattgttaaaatttatcactaatgatttaatagttagcaaatttatatgaaatctaaggaaatagaagatctcaataatgcttatgagactataaaagaaattgagaagcaagggcaattaactggcatgttggaatactatttttacttttttaagggtatgtacgagtttaggcgtaaagaattaatttcgtgataagtgcttattgaatagctgaatcaaagttgtcagaagttgaggatgaaatagagaaagcagagttttttttcaaagtgtcctatgtatattattatatgaaacaaacatacttctccatgaattatgcaaatcgtgcactcaaaatatttagagagtatgaagagtatgctgtccagactgtacgttgtcaatttattgtagcaggaaacctaatcgattctttggaatatgaaagagccttggaacaatttttaaactctttggaaattttcaaggaaagtaacattgagcatttaattgcaatgtcacacatgaatattgggatttgttatgatgaattgaaagaatataaaaaggcttcacaacatttaaacttggctttgcaaatttttgaaaaatcaaaacatagttttctaacaaagactttattcactttaacctatgtggaagcaaaacaacaaaattatgacgttgctttgacatactttaggaaaggacgatttattgtcgataaaagtgatgacaaagaatactcagcgaaattcaaaatattagaggggttatttttttcagatggcgagactcaattaataaagaatgcattttcatatctggcttcgagaaaaatgtttgctgatgttgaaaatttttcgattgaagtcgctgattattttcatgaacaaggaaatttaatgctctctaatgaatattatcgtataagtattgaagcaagacgaaaaattaaaaaaggggagatcattaatgaaaatcaaccggattctattggcagcagtgatattaggtagtgttttatcatttggacattttattgatcaggatgttaaggcatcaatacaagtagcttctgatagagttggggcataattagataagaaagagtgaggttgaataatatactcactcttttattgattaaagtaatactcctaataatattatttcccttgatgtgctaaaattaagttatattggtacttttcatcatcattataagcttaaaaaatatggtattaatctaacagtgaaagaggaatgtaaaaatgaaagaggctaatgatcattatcctagttacggggcaaataaatttgtgtgtccaacatgtatggtgtattcacaacaaaagtggtatgagattcaaaaaaatgatatggataacgaattaattctcacagagcatttaagaacaagagggcgtgtgcctgcttatgcaagtccaaataaagaagctagtgttatacatgctatacctcaatttcacaccgataacataactgctctaagtgtgtgtatcagttgtgatcaaccggcttactggattgatggagaattagtttaccctaaaaatccaactgtgaaacctccaaattccgacatgccggaagaagtgaaaaaactttataatgaagcgagagaaataagtgtactatcacctagagcttcggcagcattacttagattagcattagaaaaattattacctttattaggtgcacaagggaagagaataaacgatatgataggtgacctagtacagaagggactttcgccgaaaatacaacaggctttagatagcttacgtgtaattggaaatgaagccgttcacccaggttcaattgatttagatgaagaaaaagaggttgcattagcgctatttaagttaataaatttagttgtagaacaaatgataaccgaaagcgatgaaatagatgagatttatagtctaattcctaaggataaacgagatgggatacaaaatagggatcaaatgaaaacaacaaaataagctaaaaaaatgaacataccacaacgatgttggtatgtttgtttattgaaagaacattcatgaataagttgaggtcataggaaaagtgtttttcttcttaaagaagtgcccattttctgcccagaattaataataaattatcaaaatcagtgtaaataatataactcgatgctatgaataatggcttttgtaaatgaagatatgattttgctaggttgagggactcgaattaaaaaagaagataccaaactatattggtatcttctttttttttgcatcagagttattaaatctttttatattgctgatgttaaattaatgtcccatttttacactaacgatgtgacttatatgataattatatacaaaaatcacttatatctagaaaattaaacaaatttacacaaaaaaggacaaaataatctttacaaattacgacaaatacttgatgttttttgtaatcaacccttattttgtgacaaatatatgaatattttgtcaccctgtaaaatatttatttattatatatatttaattcgagaggaggtcatataaagaacgaatattcgaattagtatgaatttaccgggagatagattcataaaacaattaaataatgggagtgggagtctatgagaaagggctttgtgcctaaagcttacatactgaatcttaggaaaaccctaatgatttttgcagtcttgttattgattgctggcaatgtgttgacagttttgccgaatcatattcatgctgaagataatacagaggtaactcaaagtgcagatactacttgcccagctcctgttgcgttgattaacggaagctttgaacaaggtgctgcaagaggatctgcatatgataaatccggactctattatctcgaatccgaggtacctggctggaaaacgactgatgattcctctggtcagaaggcaattgaaatatggaactatgcacagaatattccggctgttgtgaaaaattggccagcacctccggatggcaatcgctgggctgaattaaacgcttttgaaaatggcatgttgtatcaagacgtgaaaacaacgcctggacaaacgatttattggcgcttatctcatatgggacggcaaggtgttgacaccatgcaggttcgtattggggcagctactagcaatccatacagtacggtggttcaaaaacaattctctgatggaagaactgcatggggaactcatacaggttcttatactgttcaagcaggccaaacgacaacgcgattcggttttgaagctgtaagtacagcgtctggaaatataggagccggcaactttttggatgatattttccttggaacagaaccatgtgtgacggcaaataagtcagtttcaccacagggagaggtacaacccggggatgagcttacatacgcggttcaaatcaaaaatgaaggcggagacgttgctgctgatgcaagcttttcagatgcaattccagagggaactgaatatgttcctggatcattaaaattaattaacggttcgacaacaaagaatttaactgatgcagcagatggtgatgaaggcaattttgatggtaataaagtaaatgttgcattaggagatctacctaacacgaccaacttgcctaatggaatgactgtacagtttaaagtgaaagctaagacaggttatgtcggcaaagaaatttctaacaaagcgcaaataaactatgacagtctattaacgaatgcaagtaaaaaaactgaatcaaacgaagtaacgactccggttgtttttaaagatcctgtacttgaatcaaagaaaacatctgctattaaggcaaaagcggatggaaaccaagacgtggatcacccagaagttggagatacgctttcttacacgattcaaacacgaaatacaattgaagacagtcaggtgaaaaacgttaccatttcagatgcggtgccagaaggcttagaatatgttccgggctctttacaagtagatggcacatcagtcagtgatgctcatgatgatgataaggggcagtatgctgatgggaaagtatcaggacaggttggtaatataagcgataccaaatggcataatgtgacttttgaagcgaaagtgaagtccggtcaagcaggaaaggatattatcaataaggcaagcatttcaggagataatattgaaactccggatacaccgagtaatgaagtcaaagtttatccgaggaatcctgccttagagtctaagaaaacatcagcaattaaggaaaaagtggcaggaaacaagtatccggatcacccggaagtaggagacacgcttctttacacaatccaaacacgaaatactgaagaagacagtgaggctaaaaatcttacgatctcagatgctctaccaaaaggactggaatatgttccaggcactctgaaagtagacggtacagcagtcagtgacgccaaagacgatgacaaaggtgatgtgacagacggtaaagtgtcaggccaaattggtgatgtgactgatactgaatggcataatgtgacctttgaagcgaaagtaaaggccggacaagctggtgaaacaattcaaaatacggctagcgttactggaagcaacgtcgacacaccagataagccgagcaatgataccgagatttatccaagaaagccaaatgtagaatcgaagaaaactgcaagcctacaggaaaaagcagagggcaataaagatgagaaacatccagaagtaggagatacacttctttatacaatcgaaacgagaaacacaattgaagacagtctgctgaaagatctcgtcatttcagatgaacttccggacggattagaatacgtttcgggctcactcaaagtagacaataaaggagtcagtgacgccaaagacgacgataaaggtgatgtgacagatggcaaagtgtcaggtcaaattggtgatgtgactgacacagaatggcatactgttacctttgaagcgaaagtgaaagctggccaagctggtgaaacaattcaaaatacggctagcgttactggaagcaacgtcgacaccccggatactccaaaaaatgaagttgaagtttatccgaggaatcctgccttagagtcaaagaaaactgcaagtattcaagcaaaagcagagggcaataaagaagagaatcagacacaagtgggagatacacttctttatacgatccagacaagaaacacaattgaggatagtctggtgaaaaatcttgtcatctcagatgaacttccagaaggcctagagtatgtttctggaacgctaaaagtagacaataaagccgtcagcgacgcccaagatgatgataaaggcgctatgacagacggcaaagtatcgggtcaaattggtgatgtgactgatacagaatggcatactgtaacctttgaagtgaaagtgaaagctggccaaagagatcagaaaattgtgaataccgccagcgtcacaggtgacaatgttgataaaccagatacaccaagccatgaggtcaaagtttacccgaaaaatccagtcttagagtcagagaagacagcaaagaatctggattccgataaagagaagtatgaagcaggagatacgattgtttacacgatcaaaacaagaaatacagtagcagacagtaaagtaactgatctcgtcatctcagataaactgccggaaggcttagaatatgttccaggcacactcaaagtagacaataaagaagtcagtgatgcccgagatgatgataaaggcgatgtgacagacggcaaagtatcaggccagtttggcgatgtgactgatacagaatggcatactgttacatttgaagcgaaagtaaaagctggtcaagcagacaaaaaaattgtcaatacggcgagcattagcggtgataatactgataaaccggatacaccaagccaagaggtcaaggtttctccgaaagatccagttctgaagtcggaaaagtcagtaaaaaatctcgattcagataaagggaaatatgaagcgggagatacagttgtttacacgattaaaacaagaaatacagtagctgatagtaaagtaactgatcttgtcatctcagataaacttccagccggattgaagtatgtcgaaggcagcttgaaagcgagcaacggtggagaagcaaccatcaaggacggcaaaatcacagctaactttggtgacgtgactgataccgagtggcgtagtgtgacattccaagcgaaaattgagtccggatatgcggaaaaaacaattaaaaacgtggcaaccgttgacggcggcaatatcgacacaccagatacaccgggaacagacatgaaagttgatcctaaggaaccaaaactagaatcaaagaaaacagcctccattaaggaaaaagctgatggaaataaagatgaggaccatccggaatctggcgacacgcttctttacacaatccaaacccggaacacggttgatgacagccttgtcaaagatcttgtcatctcggattctcttccggaaggattagaatatgttacaggaacattgaaagtggatggtacagcagtaagtgatgatcaagacgatgatcatggatattatgccgatggtaagacgtcaggagagtttggcaatgtgaccgatacgaaatggcactctgtaacatttgaagcaaaactgaagtctggtcaagcaggtaaagatatcgtcaacactgcaaacatcagcagtgacaatatcaagacccctgacaaaccgagccatgaagtgaaggtatatccgcgaaatcctgttttagaatctgaaaaaacagtgaagaacttggattcagataaggaaaagtatgaagcaggggatacggtagtctacaccattaaaacccgaaatacagtatccgacggtaaagtagaaaacctggtgatttcagatgatcttccagccggattgaagtatgtcgaaggcagcttgaaagcgagcaacggcggagaagcaacaatcaaggatggcaagattactgctaactttggtgatgtcactgatactgagtggcatactgtgacattccaagcgaaaattgagtctggatatgaaggcaaaaccattacaaacgtggcaactgtaaatggcagcagtattgataagcctgataaaccgaaagcagagatgaatgttgtatcgaaaggttccgagaaaccaaatgaacctgctaagccaagcaaaccaacgtcagagccaagcaaaccaacacccgaaaaaacagatggaaagacaaatacaggaaaagaacttccaaatacagcaacaaatacgtataatctgatccttgttggtttggtattgttagtagcaggaactgcactttggtactttagaagaaaaagaaatgcctgatgttgcatgaagaaatatcttcctatattcatcattattgccggactcgtttttacaggttacggagtctggaaagtgatggacatcagtcataaaacagaacaaactttagatgaggcaaaacttgcattaaagagtccttctggaaaaaatgaaggctcagataaagaaggatttaagcctaagttcggagaggcagttggcattctggagattcctaaaattaacgcagagcttccgatagtagagggaaccgatgcggatgatctggaaaaaggagtcggccattacaaaggaagctattatccagatgaaaacggacaaattgttctatcaggccatcgggataccgtcttccgccgaacaggagaactaaaaaaaggtgatcaattaaaggtgaagctgccatatggaagtttttcatatgagatagacaaaacaaagattgtagaccaaaaagatacgtctattattacgctgcagcataacaaagaggagctaattctaacaacttgttacccattttcatatatcggtaatgcaccaaagcggtatattatttatggaaaacggatttgagaaatccagaatatcaaagattaggctgacgaattttcgtcagcttttttaatcatgttctttctgcattctggttcatgttaaatcatagtaatctaggttaatataaaagtattttgtatatttttataagtttactttacttttttataaggtgagtttataatttggttcaagaggtgatggtcatgaagaaagattttggtgattcgatctcaaataaggtttatgaatatcgtgtacttgccagattgtctcagcaagaattagcaaagaaagtcggggtttccaaacaaaccatctttgtaatggagaaaggaaattatgttccgactctgctgttagcttttcgaattgccgaattttttaatgtggatgtaaacgagatttttacttatgagaaaggaaatgatcaaaaatgaaaatgaattcgatcacagatacgatcaccaacgcaattttttcccctttaaagtcctgggctgaacattctccgggaaattggaatattcttattggcagtgggtttgtattgcttgtagtcggattgattctgacattcgtatttactaaaaaaatgggtaagactgacgaaagaacaaaccaaatcgctttaaatggtagcctctgtacgttatgtgcactaattttttgcgacttgcttttcccaaaagaatatatgtggcaagttttcttcttatttaagtattctattgcattcttcgcttcagcaatctatctagccgttcgatataaaaaagattttttgtaaattcaattaccgagaaagatagtgtctctgtagttgtaattgttttaggagagggaacgaatatgaaatcatttaataatgaaatttggagatgtgggaaagtatgggggttttttgctcgccaattattaaccacaattcatacaaaccgttagagatgatgtaaaatgtaatgaaaataagctttcataaccagtgctatggattgactatgttgagggcctagtggggtgaataacccgtaaaggttcaagttctctcggccgcacccccaataataccaagggtttaaccatctttggcgttattcttttgcggaaaatacggcaacaaatgtaccgcattgtggagtccactaaaaaagtgctgacctctgcacaacatcgttgcgcgagtctgcacttttattctgcgattatggggagtttattttaatccgttgttagccgcgccgatacttggcttttagaagctttttttaagtggctaaaaccaacaaattttttgccttcttcatcccataggcggaactttaacgatttaaggcttgttgccagtgtaatggtcggaacgttttgcaatggtttagtgttgttatgcactttttcaagcttatagtttgggactctcgggcttaaatgatgaacatgatgaaaaccgatattgcctgttagccactgcatgacttttggaagcttataaaaagagcttccttcaactgctgcttttacatattcccaatgctcatcttcttcaaaataagaatcctcaaacgtatgctgaatataaaacatccaaattccgagagagcctgatatcataaaaatcggcacctgaaccagcaggaagttttgccagccaatagcccaacataaaagtgctgccaaagcgacgatccccaggttcgttacatacgtattcatccgttctttgcgttttgccccttttcgattaaaacgattggcaatcccgaaaacgtaaatcggcccaataataaacataacaaacggatttctgtacaatcggtacattatttttgtcttagttgaggctttcttatattcctcaaccgtcagtacccaaatatcgcctgtaccgcgtttgtccagattgctgcttgtcgcatgatggacagaatggtcgtgtgcccaatgatcaaaaggatgcagagtcagaattcctgttaatgttccaaggattcgattcgcctttctgttcttaaaaaaggaatagtggcagcaatcatgaaagatgatgaaggttctcactaaaaaacctgccgcaacaacagaaatcgctaatgtaaggaaataagaaatcgacaagctcttatatgccaaacaccataataggaaaaatggtaccaatgtgttaatgatttgacaaatgcttttgtgtaaatcggacttttcataaggtgtaaccagttttctcaaagtccttaggttttgttctttcatattaaaaagtttccccttccctggtgatcttctaagtgtagaaaacgttttatagccttagaaggcccaacgtgatacaccccatatatgataagtatccttcccgattcatctgtgaaattattggaaatgataaactgatttccagtttattattagcagagtcagccgggatacaaaaggcgtatgaagattatacccagcactttattgggtcaaactctctcaatgctcccccatggggatcgatttatttgaccgtgaacattgattgtttgaggaaaaaaggaatgaagtaatgggtatatccatgagtgactgtttggaaacatctgcagaaacaaagttttacaagtgaacagccttgtttttaaaagattatcttgctctttaacaagaaacagctgagctaagtactattaagcaaagaaaaaggtttgaagacactcgtgattcatttttcatggtgttttcaaaccaaagtttttaataggcctcttattctgcactggtatacacatgtttaacaaataatgccatgaataaatcggaaatataatttgcagttatttccgattcctgatataataaagaagaattatttttgttcggtgtaaaggatagtatgaagattgacttttcgtcttgatgatactttgggcaaggatagtatatactgtgtggttacacactaggaggcaacaaaaatggaacaaggtacagttaaatggtttaatgcagaaaaaggttttggttttatcgaacgcgaaaatggagacgatgtattcgtacacttttctgcaatccaaagtgacggattcaaatctttagacgaaggtcaaaaagtatcgttcgacgttgagcaaggtgctcgtggagctcaagctgctaacgttcaaaaagcttaatcttcaatcgtttatacaaacaggctctttatatagggcctgtttttttatgtctatatcatactcaataaaaaaccctactcaacgttcgagtagggagatgctacaaggtatagaaaaagatttaaaacttcaaaggtttgtttacagtataacatactggattgacaatatgcggaatgtatataaattatttaatgttttgttcaaatataactctttcttttttcacgttcgttactttaagtaagattagatgaattataaaaatggtttcatctaaatgttatcaactcgcatatctcttttatgagaagaagataaacaattattattcaatgtggcagtggatataagaaattcttaaaaataatgaggagatcgattgtttttttctcctggaaataatcacttagagatacctaaaacaatgaaagccctacctctcttccatccttacggctccttgtccgtgccagtgtgaatcaggatactaaaaaaagtgactattttattgagttttttggtaaaacttcaatcttcgcagaagaaatgtaaataataaaaatggattagaatgtaggaataacaaaagaggtcgttaatgttctaaacataagttggagaagatttgcttttcatcataatattccgaaatatcttttgggatgtatctaaccaaaactttttatttgtttttcagtgattcctttaattacttccagttcactaatcaaaaattcatatgcattatccagcatttttttttcgcttgcattaagtgctttttctttcttcatacgcattaaatcacgtacaacttcagcaccttcttgtatttcacctgtttttattttgtccgtgtttattttgtacctttgcttccatggcagtaacctatcggattctccatgctgaaaaatgtgcataatgtgttttaatgcaagtatatcggtaactggtcgtatattcgaactcaatattttactcgttggaatcataactgtcatattactgattgacattcttatgacataatactgttgtttttcctctaagaattctttttcttctatggcttcaattatacctgctccgtgcattggataaacaatgttatcgccaatttgaaacatatcatccacctccatatatggtatccttcttaagattaccatatatggaggtgtaatatcaaaattttaataataacatgatcgaatttttgatgtcaataacttttttgaaaaaacagatcaagcaaaaacaatagggaacgtgtcggatttccaatcaggaaaaggtcaattgatccgtgtgagcagtttttcattggctcaatgacatcacagaaatgatttgagtagaaataagaaggaacgatatttgtgaaatgtcagctaaaaatattaaaagtacatgattaagttctaatttctttaccgatttgatatggataacggcccacttacttaatgatgcattttcacttatcttgcgaacagaaaaaggtttgtggatattgaacattttgccaccgagattggcattattatcatggaaattgacaaccttcaaatgggtattgaggtgaaaagaaaaataaagaaaggagagattataaatgaagaccagaacataaagaagtgaaggggaaagaacaaggttaattgaaaagcaaactatataaaatagtttgcttttctttttgttatgaattcacttctttttctttctctttaatgactaataaaacaccgctcagaattaaaaacgaacctatccaaaatgtcccgcctatttgttctccaagcagaatccatccgagtaaggttccaaccagaggctgaaaaaagaaaaagaggcctccacttgaggcatttaataattgtaagcctcggttccacaataaaaaagcacaagcggttgaaacaattcccaaatacaaaagaccacctagaattttagggtcaagcagttgtgatgtaaaaatggtgctaggttttacaaaaggagttagcgccacaatggcaacaaaagttgaatatgttgtaacaagtattggtgaataactgcttggaacgcgtttgatcagcactgacataagtgcccatgtaagggctgcaacaagcagagaaataccgccaagctgatgagatgtatcaatatgtccgtttcccacaataaagaatacacctatggtcgctaaaataattgaggttccttttttgatagtcaatggttctttaagtaatagacgagcaaaaataaccatgaacgctggtgtggaggacgtaataattgctcccatttgtgctgaagacaacatcgttccatattcttgtgtaacaattgaaatggtgttgccaacaattccaatggccacaattaataaaagatcgcgcttatgaattttccaagattgtttccttattaaaccaacaataagaagcgcaaggatggcgatgacatacctggtccaaaccaattcaaaaggcggaatcactgcgacaacaaccttaaccacaacatacatgccaccccagatactagcggctaaagctaaatatatagaacctaacagggtatttttcatttttttgttccctccgtatttaaaattaggtcaataaatgccctaacggagagaagtagtcactttactccattaagggcggagaagtgctactggaacatcattttcaaatagtggagctaaaaacatgttatgatcacctcgatttttaagaatgactatcattatacaatgttggttataaagccgtaaacaccttaaggggactccatttattaatagaataaactttatgaattcatttttttgtatgataatggcgtcatattcatcgcttgttgaaatttacttatgaaataactggtactgttaaatccaacttgataagacacttctgtcacattggattcagggtgttgcagtaataataagcttttttgaattctataatccattacataacgtaatggcgtcttattcagcattcgtttaaaataacggcagcactcagaacggctcagttggccagcttttgcaatgtcctctaatgtgattttttcagcataatggagatggatccagtttaacatttgtttcattcgatgactttttatcatttcagattgatcgtactctaattgaaaaccattaacgaccatgtttttccacattaacgttaattgcatcgtaatgtcaatctcatagagcgatgtcttttgttgaatcaattgatttatttttttaacagcatctagaatattttttgcccactgttgatttccatccaaaaataaatagggcaaattggttgaaaacatatagggctgaacatagcttgaatacagttcctgagataaaacgaaatggggtgacacatttaaacaaatatacgtacaatccgagccttccttttcttctgccatgtgcaggcagccgctattgataaataatccatccccttcgtgaacctctattttttcttcatttatttgaaagagagctattccttttagtatcaaaacaaattggatttcatcatgccaatgaagcggaatatagccatttatattttgattgatccttgtcttgtaacaggcaactggtaattctaccgttcggtgctctgttaattcttttaaattttgatcgatcacaaaattcttcattctgacttctcacctcaatatatttatattttttcattcgatttgagtattttttatcctattttgcatttattataacactattattatatttattagtgaggagtcatgtatgaatacttccaatagaagaatgggattgttctatgttataacaggggcgacatgttggggaattggaggcacagtagccaaaaaactttttcaagaatatcaaatcgatgtcaattggcttgtaacgacacgcttgcttacggctggaatgttacttttaatgctgcaactgttcagaaaggaccggtctcaggttattgaggtttggaaaaacaaagcgtcggctggccagcttctaatttttggcctattgggaatgcttgctgtgcagtacacatatatggcatccattcaacatgggaatgctgccgttgctacattattgcaatatttatccccagtaatcgtcattatctacacgcttttgcgaaaacaaacggttcttaccaaacaagatatcattactgttgtacttgctttagtgggttgcttttttttgttaacaaatggttcaatatctcaactttcagtgccggcagctgcagtagtatggggagttttatcaggattcgcggcagctttttatactttatatgccgttggtttattaaataaatttgattctcttgtcgttgtaggttgggctatgattattggcggttttgcattgggttttatccatccgccatggcaactggattttcaacgattaactgctgaggcgtatgcatatattttatttgtgatattatttggaacaatgattgcgttctggttcttcataaaaagcttggaaagcctttctcccaaagaaacaagcctattaggcagtttagaacctctatcagctgttgtaacaactgtcgtttggttaaaagcgccatttggttcttttcaatggattggtgctatttgtattatagggataactttaatattggctttacataaagagccttctatggagagtgaaaaatcgatattaaagattaggaatcatgcaaatcgggatatataggggctttttttgcttacatgaccggtccgacaatgaaaaacactggtggagtttgagccctctcggcaatatcaaaaagaccaagggttttgacgcccttggtattttttcttcaagaaccttcaatttttcttttttgtaattggtatccaaatttcacttttaaaagatggtgatgttacatccttatgctcgttccacaatatttctggaccttctatttgttcgtaatttgacgatggaaaccattcggaataaatacgtccccatacttcttgcagtgtatccggaaatggcccgattgattcgaatacagcccacgttgaggcaggaacttcaagccgtgagaaattatctggacactgtttcgttgtggctgcgccaatatagtgatcaagctctcctttttcctctgcccgaccttcagaaaaattggtggatgcactaatgagtcctgatggtgctacattagaaagctcttttagtttatttattgctttttcatctaaactttcccacatagatgcaatttccggattaattcctttgaaaataatatgaactctttttttaatgccaacgatgcgaaatgcctctttttcttcaatacggtagttcatttcatttcctcctttaattgttagctggaaggtcattcgtggataagctttaagggaatggccattaagtctggcttttgatgggtttatgccatgtaaattttggaatgcccgtgcaaaagaatcaggtgagttataaccgtactttattgcaatatcaatcacttttacattgctgtctttcagttcaaaagctgcaagagtaagacgtctgcgacgaatatattccgataatgaaatacctgcaaggaaggaaaacatccttttaaaatgatattcagagcagaaagcaagctttgctgcctcttgaaaatcaatatcattagtgaggttttcttcaatatactttaacgccctattcatacttttaagcaaatccatttatttggcctcctttaaccaaagaataacaggagtgaaatgtatatatccgacattctgtgcacagttttgcaggatgacttagatgaaataaagtaagtgattcacttgtatttgtacaggttttattgaagcatgctgttcataaaaaggcatcaataaaagaaagttataattgtcttataaacggcacattcatataattgagtgaaaaaggatgcgtatcatgcctatcaattcttttgaaaactatccgatgagctggaagccatcgattgataaagctgaaaagcctatttataaagcacttgcagggcaattggaacaggatattttaaacggagttttattacctggaacaaaacttcctccgcagcgagaattggctgattatttagatttaaatgtgagtacgatttccaaagcatttaaagtgtgtgagttaaaggggctgctgagtgcgactgtagggagcggcacatttgtatcgtatgatgcgttgtcgaatgcgtatttacttgaggatacaaagccgacacatttaattgaaatgggagcaatacttccagatcacgcttcatatgagcccttgttacaccaactgaaaaacatgattcaggaggaggattatgaaaaatggtttagctacggccgggcaggcgaaagcctttggcaaaaagatgcagctgtaaagctcatccaaagaggcggatttgaaacatccgttgatcacattttatttgcaaatggagggcaaaatgcgattgctgcgacattggcgagtctttgtaagcctggagaccgcatcggtgttgaccatcatacgtaccctggattaaaaactgttgcatcattgcttagtgtgcaaatcgtaccgataaaatcagaaaacgatgaaatgagtccggagtcacttgaatatgcgtgtaaaaacgaaaatattaaaggtttgtatttaatcccggattatcataatccgacgacttcctttatgtctgttgagaatcgaagaatggttgcagacattgcaaagaaatataatctatttgttattgaggatgcatcgtaccatcttctcaacaaaaatccgcttccggcactcgcctcattcgcaccgcaacaggttattcatattgcaagtttatcaaaatcgttagcgccaggcctgcgtttggcttatgtagcagtgccgagacaatataaggagccaatatcaaaggcgctttataatttaaatataaccgtttccccgctattagctgaacttactgctcgcacgattgtatcaaatcaatttgaagtcttaattgagagtcatcgtgaacaaaccattcgcagaaatcaactcgtaaaccgatatgttgcgggatatacatgtttaggtgttgaaacaggcatttttcgttggttgttgttaccgggtaaaatgtctggtgccgaatttgaagaattggctgctcgacatggcgtgcaagtgtatgcggctgaacgctttgtagtgggaaatagttgtcctgaaagggctgtaagggtttctgtctgtgcaccaaaaacacttgaagagcttgaacaaggattaatgatcctgagacgtttgctagacgatcttacctaatattgtttgccatacaattatgacattgtatggcttttttgtgcgtgttatgatgatccacatctagagggaggtttatacaaaattggcttttagaaaggaaggtcagatgatgttagacaaggacagcgtaaaagcaatagatgttcaaactgcttcattacaaagctacatcagttcaccagaaaaacaaaaatcgttatacaagcgtacactattcgttgtgagtatctcacaaatttttggcggtgcggggctggcggcaggagtgactgtcggtgcgcttattgcacagcaaatgcttggcactgatgcgtttgctggtctgccttctgcgttatttactttagggtcagcaggatctgcattaattgttggaagactttctcaacgttatggccgtcgaacaggtctttcggctggctttatgattggcggacttggagcaataggcgttattatggcagcaatcataaatagtattttcttgttatttatttcgttgcttatttacggtgcaggtacagccactaatttacaggcccgttatgctggtacagacttagcaaatcataagcagcgagcgactgctgttagtattacgatggtttttactacatttggcgcagtggcaggtccaagcttagtgaatgtgatgggggatttcgctctttctattggtgttccatcacttgctggccctttcattttagccgcagcagcatatattttagcaggtgtggtccttttcattatgcttcgtccagatccattagttatagcaagaacaatagaagcggcaaatgaagagcctggtgataaaggacatttggcggcaactgagcatacagaaaacaaaaaagggataatcgttggggcaacagttatggttcttacccaaatagtaatggtagctattatgacaatgacaccggttcatatgagacatcatgggcatgacttgggggcagtagggcttgttattggttttcatataggtgctatgtatctcccttcactggttacaggtgttcttgtagataggttgggacgtaccgcaatggctatttcctctggaacaacgttgcttttggcaggtgtaatagcagcatttgctccgggagattctatggttcttctcgtcattgctctttctttactcggattagggtggaattttggtttgataagcgggactgcccttattgtagattcaactgatagtgccacacgagctaaaacgcaggggacagtggatgttctgattgcgttgtcaggagctgctggcggagcattatctggaatgattgtggcagggtcaagttacctggcattatcatttactggagggatgttgtccttattactcattccagtggtggtatggtttaggggacgataaaggataggattgtttaatttacattaatttgttatattgttagataaagtctattgcgtcgtctaataatctaactaactatagttgctccattaaatctaaatcagcaattttggtataaagatttgtgaccaggattccttatagctgtgtcactcactgcatattctttaattgaatcacataaaatggttatcggatttgaaaaaggcaggattactcgctttaggtaaaggagtcatcacgttgttaaaaaggttttctcttgtttttgttacactaatgatgtctatcgttgttgttttagcggccgctaaagagtcgcctggagattatgtcatctcatttgatgaacctattatcttgatgatctcaattggaatcgttgtatttttatttatccctccattagtcatgtccttttttggcaatttggttgtaagaataatatctggtgtataccaatgttttatcgttttcacttttctggggctcattccaattggatttcttattcccaatggctttttgacaattctagtttctattgcaggaactttagtcagtatagctagtgttgccgtaaccttatgcattggcaagaataaaaaagatatataataattgaattgttattttttcagattgtcagtgaaatagtaaaacaagatgagaaggctttgtgggccttcttttttttgttgttgcatcatccccactttaagcttaatctattgaataataagagaaggaacctatagaagaataaaataaataacgagatgtcaaaaataaaactggacttcattattatcaattcacgtaaatgtaaaaagcttggaaagaggggaattctttcatgacaaatagcagaacgaatccgaaggttgatgaatttttaagtaaagcgaaaaagtggaaggaagaatttgagaagttgagaaccatcattcttgactgtgagctgactgaagattttaagtggatgcatccttgttacacatacaataataaaaatgtcgttttaatacatgggtttaaagaatattgtgcgcttctgtttcacaaaggcgccttattacaggataccgatggaattctcattcaacaaacggagaatgtacaggcggcgcgccagattcggtttacaaatgttcaggaaataaatgagctagaaaacattttgaaagcctatattcacgaagccattgaagttgaaaaagccggtttgaaagtggaagttaacaaaaatattgaattgaacattcctgaagaacttcaaaataaattcgatgaaatccctgcattgaaaattgcttttgaagctttgaccccgggacggcaaagagcgtacactctttatttttctcaagccaaacaatccaaaacccgagaatcgagagtcgaaaaatatgtgcaaaaaattctcgatggaaagggattaaaggattaggcacgccaaggttcaggctaaaggaatatcatcatagcgtaataagatcctttctatagaagaaaaacaagcatagtaagatgcttgtttttttcttaggacaacattcacttactgctgaaatgcttctaacattgtatgccactagacagcgttataaaatattaatgcaacacctagaaatagctcaatggtacggctcatcacatttagaatgcctaggagaactaatagaaccggaagatttttagcaagttactacactccaaactttgtttttgtattaatataccttattaaccattgtttttagtcaggtgcagacaaacgaatactgattaatgaatcatcatgatatcaatgagccgtttgattttttcatcgtcgcctgtatcaacgtacactgtttttctgttttttatgatactctcagtcacttccctcatgacgcctttttctatatcatcagcggaatcccagcgtaaaggcacattatatacatgaattgtgccatccccattgccatgataagtgactgatccatccactaaacgagaacctgccaactgggtcacattttctggatagctggcacttgtatcatcattaggattaattggctcgccagccgaaatatgtcgaacattcaattcatctatctcttgattaggtccaagttgaagccaaactctggcatattcaattttttccgaagagtatgctgccaatacattgtcttctttgcttttctcctctgctgaagaggtatcatttgcagcttttgttgcggattcttctgattctgttattggctccgcttcatccttgcgtattttggtgctgtcttcagtctcagtgtgtttttcgtcagtttgtacagcagaagcttgatttgaaggttgttgtgcttcttcatccttactgcccgtacatccagcaagcaaaatcatgagcagcagggcagtattgcaatagcatatcattctgcatttcttcattttttcattcctctccattaactcaggtcagcttcatatataagtttatgtatctaaatattaccatggaatagataggatgatgttgaaaactgtttaagaagaggaaacgatcttgaatagcatcgcgaaaacttaagaattcttaagaagttttgcccctttttcttcaggttttgaatgtaaagtgggatataaatgcaaaacaaatggagagattagatatgaaacgtctgttattcttatttcagtatatagtgaatccgagaactgttggtgcgatccttcctagttcaaggtatcttggagataaaatggtggatggaattgatttcaagaaggctgcatacattgtcgaatacggtccgggtacgggtgtattcacaaaaaaactgcttgaaaaaagaagacctgaaacgactattttattagtggagcaaaatgaagaattttatttactattgaaagagacatttaaagacgaaaagaatgtatttattgtaaatggatctgctgaaaatagcagccagtatgcaaagaattatggtatgccttatatagactatgtgatttctggccttccctttgcaagcttgccaaaaactgtttcagccaacattttattagataccgcaaagattttaaaaagagatggtgaattcattacttttcaatacactatgttgaaaaaaccgttttttgaacagttttttaccaaaatagatgtaaaaagagagcttagaaatgtaccgccggcttatgtctttagctgctcgatgccgcaaaatgatttggaggaattatatggagtcgaacgttcttattgttgatgatgacaaagacattagaaatctcatctctgtttatttagaaaatgaaggcctgtacactcaaaaggctaaagacgcaatcgaagctttaaacctgctggaacaaaaagaatttgacctgatgattttggatattatgatgcccaacatggatggtattgaagcatgtatgaagattaggcaagaacgaaatctgcctattatcatgctttctgcaaaatctgaggatatggataaaattcagggacttgccgctggtgccgatgattatttatcaaaaccgtttaacccattagaattaatcgctagggttaaatctcagttaagaagatataaaaaatacaatactgatacaagcagcacgaagaacatcattgaaattggtgacttgaccgtaaatacagatacacggcaagtatgggtgcggggccgggaagtcaggctgaccccaaaagaatttgatatactcgaacttctttgcatgaacaaaggaatggttctgagtgtggagaagatatatgaagcagtatggaaggaagacttttttaagtcggacaacactgtcatggtccacattacaaaaatcagagataaaatagaagaggattccaaacatcctatttacatcaaaactgtttggggaacgggatataaaatatgagaaagtttggaaataagctggttgcaaagcttcttggcgcgattgcaattagttttcttgtttcattgggtatgatggcactcattatattatcgaacgtctatctacaaaagatgaattatctcaaagagtttagcatccggagcagctattttatgatactgcttcagttttcggcagctattcttacttttattgcagttttttttatcatggcacggaaaaaaatattatatttgaagcttattactgagagtgttcatcatattgctaatgggaaattaggcttgaccattaggattgaaagtagggatgaattgacccagcttgcccaaaacattaatgatatgtccaaagagttagaaaaaaagtttgaacacgaaagacaattagaaaggtcgaaaagtgaactgatttcaaatgtatcccatgatttaagaacaccattaacatcaattatcggatatttggatttattaaaaaaagggcaatacgacagtaaagcgcaatttcaggaatatcttcaaacgattgattcgaaatcgcaaagactgaaatacctgattgatgagctgtttgagtatacgcatttatcgagcccggacgttaagttaacctgtaaaaaagctgatttgtcaggtttattggaacaaataataggagaatacattcctatttttgaaaaggaacgactaagtgttcaaaaatcaattgcagaagacaatgtacctgttgtaatggatatagaaaagatggttcgcgtttatgataatctctttatgaatgcgataaaatacagcaggaaaccatctgaattattcataagccttgagatcattggtgacaaagcacttttgaaaatttctaatcaagttgagggttttccggctgacaatatagacaaattgtttgaacggtttttcaggggtgataaggcaagaacagatcaacaaggaagcggccttgggctagccatttcaaaaagaattgttgagcttcataatggtaatatccatgcggattatagagagggctggatgagctttattgtcgaacacccattgtgtatataaaagcttatggaggaaagtttccataagcttttttctttagaataaaacttaagaaaccttaagaattttacggagagtttcttcattcttattgcttatcatgtaggtatggaaagtgaggagagtgtagaaattgaaaagtaaatttcttattatagctttgtggtttttagccatttatatagcaaaggaatatcatttactgtcactcgatatggatgatttacaggaatttatatcgttgaacacaaaatacgcaatgctgctgtttattgcgctctggatcattagacttctcttttttattccaggtgtgactctcatgtttttgggggagtatgctttgatccggttgtgagctttatattgtcgatggctggcatttttttgagcgaaaccttggtttacgttttttcaagaatgttttcaagcgggaacatgatgaaggatttagaacgtaaatatccagagttgaaaaaattattggagacttacaattataagtttttggcgctggggatgatttgtccaatagctccaacagatgtcgtttgttttttatcggcagctgtaggaatcaagtataccacttacattttaacggttatcgttacgaatatccctttattgatattttcgagtttcattgtgatcaattttagtgagtcattaatgggaactgtattggttgtcgcatcatttgttttggtttctattgtatccattaaaatgtggaacacccttaagcataaacggagcacatagaaatgccacgagactaaccatttatagcttataagcacctgtagagatttaagttctttcggtatccaatagtaccaagggttaacagcccttggtattattttctgctgcacatatataaaccctccattttcgcttgtagatccttttttatttttgtattttaggttgaatgatcaccagaagaaaaatgaacgcatgatctgaaaagctgttttgccgcaaaataaataacaccccgatgatcaacgataacaatcccgctactacgatatattgtgtgtctgattttgattactgtatataatcgttttttagtaaatgctctttcattttttgtatagccttcgcttcgtcagatccatttgcgtgtatatatattttggttccgggtttaattcctaaagccataatgtccatgatggcttttggcgcttgtttgaggttaacagttttcccttggtattcaagaaaaatatctgatgtaaaccgatgagctagtctgactaacagggtagccggtctcgcaaaccctgtttccttaatgatcgtaaattgtcttttaatcattcttcacctcattacattctgcctcttgacggatttatagttgggttgcagatcaaatttgaatttagagtacctttaggataagtgatctaatttcatcgaaataacactctttctttgtgtttacaaaataattctcaactaactaaaatggacaatgacttcattcgagaaaaaagcatgattcactatcagcttttgtttattattgtaaataaaaacatggtgtgtacaatggttacattcaggcgatttgttgattattcaacattccactctaaattgttgattatcttaagaaagtttggtgaaaagctatgtccaaagtggatagaagaataaccaaaagccaagaggctattaaaatagctctgattgagctgatgactgaaaaaagttttgatcatattacgattaaggaaatttctgaaagggcaaatgtaaaccggggaacaatctatcttcattacttagataaatttgatctattagaaaaaattatggaagagcatataaacaatatgggggatttttgtgagtcggcagctgaaatggactggattgaatcgactgtacactgcatggaataccttgagagtaattatttattcttttcgacgatgttagccagtgaaggcgctcgatattttcgcagtcagttccttaagtttaatatcgaagagttcaggaaagatgtagatgtaacgaaaggcaagaattacggccaaagtgaagatgtcattgttgaatttatagcaaatgcttacgtaggggtagtggaatggtggttaaaaaacgaaatgccttatccgcctcgtgtcatggcagaaaaagtgggggagttattagagcggattttataatggaggcaggaaatgggtgttgacttatttgtctaggcgggagattcaagtctcctcgatcgcatacaaaataccaagggccagcaacccttggtatttttataccttcatgcatttttgaagtttatgcttaaaggtctgccttactttgcaaatcgccgagctgctgcaacgcacatgataacggcgatattcactgctacgagtgcccagcccactttctcgtgcagaatcactgaggcaagcagcagcccaaaaaaaggctggagaagctggagctgcccaaccgccgcaattcctccttgggcaagacctcgataccagaacacaaagccgatcagcatgctgaataaggatacatatgcaagactgagcagtgcgggaacgccgatgtccgaccatgagtccggcgtaaaaaagaacgacaagggcagcataagaggaagcgacagaacgagtgcccatgagatcacctgccaattccccagacgccgtgaaagccttgccccttctgcataaccgagaccgcatacgacaatagaagccagcatgtacgcgtcgccaagcggggatgaacctcccccctgaatgagggcgaaacctgctactaacaagctgccaacggttgagaaaatccagaagacggggcgagggcgttcacccccgcgcagtacgccgaagaccgccgttgcaagcggaagaagtccaatgaagacaatggcgtgtgcggaagtgacatgctgaagcgctaaagctgtcagcaacgggaaaccaatcactacgccaaacgctaccactaataatgaaatgaggtctcttttggcaggatgctgctgccggaagatgagaaggagacctcccgccagtacaccagctatcgcagcgcggcaaacggtgagaaaaaacgggtcgaagtctgacacagccaaacgggtcgcaggcagcgagccgctgaaaatgagtacgcctataaaaccatttatccagccatttgttgttttgttcattataatcactccacatatctttcttgttcattgtctgtattttcttaacaaaaccagcagctaaggattacaatgactataaactggaattggccttttttaaacggccagttttcataaaaaaatgcataccagttaggagaacaacgtgcaaatggatatcacgccttttttgaatagaactctggatattccgctttatcagcagctttatcggtattttaaagaaaatatgcatcggggccgtattcaaaaaggaatgaagcttccttcaaaaagactcctggcgaatcagctttccatcagccaaacgactgtagaacgtgcctatgaacagctcgctgctgaaggttatattgtgagcaagccaagaagcgggtggtttgctgattatcatgattctgattttgcttatgatagaatgccaagcacaacacccattcaacaagaagcagaagaaaataaacaatggattgattttcattatggaaatgtagattcttcttacttccctttttccgcatggcgaaaaagcatggtcaatagcttagaccaatatggacacgagctttatcggccgggacatgttttaggagagtttgagctgagaacactcattgcagagtacctgtatcaatctcggggtgttcattgcggccctgaacaagtgattataggtgccgggaaccctattctgctgcaaatcttgtgccaagtttttgagccgaatatttctatagggtatgaggatcctggttatccaagagcacgcaagatttttgaagccaaccgcatgaatattgttcctataccagtcgatgctgaaggaatctgtatacagaagatcaaagaacagcagccaaaccttgtatatgtcacaccttcccatcaatttacgctgggaacaatcatgacgatcaacagaagaattcagctgctcaaatgggcggccgaacatcaatcctttatcatagaggatgattatgacggggaatttaggtacacaggacagccggttccttctcttcaagggcttgatcagcataaccgtgtcatttatatgggcactttttctaagtctcttttgccctcgctgcgtatcagctatatgattcttccttcacctcttttaaaaaaggggcatgaaatcacatccttatataagcaaacagtgtcctgccacagtcagctaaccctagctgaatttataaaaaatggagagtggcaaaaacacatcaacagaatgagaaaactttaccgcaaaaaaagagccattgtattagaggcagtgcaaagggaattaggagagcatgtcagaattcgcggagaaaactctgggcttcgtatcttacttgacgtttatttgccatttggcgaaaaagagttaattgagaaggcgaaaaaacatggagtaaaaatttatcctgtttctctttcttatcaacatcatcctcctgcaaaaacggtctcgctcgggtttgcaggggtttctgaatccgacataagagaaggcataaaaaaactgaaggctgcctggaagatatgagggagctttcagtttagcaaaaaggccaagtgacgactaagtgttgagagctgttcaatattatttaagtatatgatgagtgcctgcagtccaggccacgatacgtctgtttagcgaaaaacagaattttttatttgctcctcacagtgctaaaataaacaaaatagacaattgaaaaaatagaggtgtaagaatgaagttagatgagtttacaattggccaggtcttcaaaacgaaatcattaaaagtatcaaaagatgatattatgcggtttgcgggtgaatttgaccctcagtatatgcatgtagatgaagaaaaagcgaataaaggcagatttaatggaattatcgcttccggcatacaaacactggccatatcttttaaactttggattgaagaaggtttctatggagacgatattatagccggaacagagatgaatcatatgacattcataaaacctgtatatccggatgatgaattgtttacaattgttgaggttcttgataagcagccaaagagaaatgaattgggaatactcacagtattgctatctacttataatcaaaaagaagtaaaagtgtttgaaggtgagttatctgtattgatcaaacgataactcagaaagcccgcttttcgcgggctcgattgaagcagatgggggaaagatgttagcgagtttcctttgaaaaataagaggttaaaacatcataaacaataggcaaagaagtaaatccctcatcttctagaaaatgacctccgtgctgaacttcatataacgcagcatcaatttgttgtgccagatccttgctgaatgaaaaaggcacaatttggtcgtccttagaagcaatgacagcacggtgcttcgcggactcaatgattgtttgatgatcaaacgatccctgtgtaaattcatctaacatctttaaagtgggcaatgatttggcaaagccggaaacaagtatgattccgccaagctgttttcgtaattgaagatgttccaaaaatctcaaaatggcggggcaacctaagctgtgcgcaaccaaatacgtattttcatgtaaagtgtgctgatataaagagagtgtatccagccaatcctcaagtcttggctggagcggattaggcatgtttaaaatgtctgcttggaccccatctgcgagcagacgttttttcagccaagggaaccaatgatttgttgaggaggctctgtagccatgaatgatatagacttgttttgtcattatttcctcctaagaaatattttcattcagtataaaattcctctcattgggaaacaagtacgcacttttttgtaagtagctttacatatgaggccctccttgtgccattccccacttacacatctcatctatgaggggatacaaagatcgccctctgtcagataacgaatactctactttcagtggggtttgagaaacctcagaccgatgaataaggccgtcagtttgcaattccttaagctgtgcgcttaacattttatgggtgatgaagggcatagcccttttcagctcgccgtatctcatcgttttttcactaccctaactcatagagaattctcattttccatttgccccctataagagataaggtgtattcaaatggggcttgtttactgcggcacaggctattcattgtaatcaaacctccttttttaagtatcatatcagaataaattaggattttcggtgttgaagtttgagggcgattcacgatctgaagtgaaaggggccgcttgctcaacaggcggcacggtacatgaatgttctaagtcaaagagggttaccttactgttagttactttatttaaaaaaacgcatgtttttagctgaaaatatctattatggtatatttaaatataaagaaatatttgagaaatgaggaatggtatgaatacacccaaaaaacataagaaatttaaagcgaaaatgattctccaaatcatcatggttatcattggaggaatcatagcggcatatggactagaaacagtgctcattccaaacagtgtatctgatggaggggtgacgggtcttagcatcgttggttcacagctattcaacttgccgctggggattttgattgcagtgatcaacattccatttgtctggttaggatataagcaaattgggaaaagctttgcattattatcaattatcggaatcgtatcgcttgccgcggggacaagctttttccaccacacacccgccatcatagaaggagataccctgttaattaccgttgtcggcgggattatccttggattcggaatggggctggcgctgcgtaatggcggcgcattagatggaattgacatgcttgctgtgctgctatcccgaaaactgccattcggaacgagcgatctcattctattcttaaacctatttgtgtttatctttgtttccacagtatttggcttacaaggggcattgctttcagtcattgcttactacattgcatccaaagtgattcatgttgtggaggaaggcttaagcggctctaaaacctttcaaattattacaacccaacctgaattaatggtagagacaatacgtgatcaattaggccgaagcgccacatataaagaagcttacgggggtttttcccacgagaaatttaaagaaatcacatgtgtcatcaaccgtttagaagaaaccaaactaaaggaaattattaatgatattgataaatccgcctttgtcaccgtatatgacgtagctgaagtgaagggcagcaattttagaaatcttaatcatcactaaaaaatagaatgacctttttaaccgtaactgacatgccgcgggtaatttaatcaaaaacacttttttgagggcttgtgggtgtcaccagtgaaggtctgaatcataaaaataccaagggaatcaaaacccttggtattttttctggttattagattttatcttcagctttacgtgctgcttcgagcttatcaatcctgtctttatatttttctccccagtccttcatgtgcaggataacaggttctaatgttcttccaaactcagttaaagagtattcgacttttggagggacctgtttataaacctcgcggtgaatcacgccatcccgttccaattctcttaattgcagcgtgagcatacgctgggtaattttggggtatagttttcgaaactcattaaacctttttttaccgtcaatgagatgataaagaagaatgcctttccacttacctccgatgatatctaatgttgtctccaccggacatccttcaaagtcatcagaagaataatcaatgccgagtttacgatttctcaagctgttcactcctaatagtatactttttgatactatatacattcaatgtgcgtactttttatatattaatatacatcatataatgatgtcacatctaaggaatgaaaggaatggatcatatgaaaacactcgtactcgttgtacatccgaatatagaatcctctcgtatcaataaaaagtggaaagaagccgttttaagtgaaccagatgtaactgtccatgatctttatgaaaaatatcgcgatcaaccaattgatgtggaatttgaacaacagcagctcctggcccatgaccgtatcgtttttcagtttccattatactggtacagcagcccaccgcttttaaaacagtggtttgatgaagtgtttacgtttggctgggctcatggtcccggcggaaataaattgaaggggaaagagtgggtaactgccatgtccatcggttcacctgaacactcttatcaagccggcggatataacttgttttcgataagcgagctgacaaaaccgttccaagcatctgcccatttagtaggcatgacctatctgccttcctttgccgaatatcgcgccaatacaatcagtgaccaagaaattgccgaaagtgcgaatcggtatgtaaagcatattacaaatatagaattaaacccgaaggttcgcctgcaaagatatttgaaacagctggagggtgtcgatttaacataaagattgattttggaaaatcctgtactcaccaagcaggattttttcttgttcagcagagggattttaacatatagcgaaaaaagaagaagccaccaaaaataagctatttgcttggtcctgactgcttatttttggtgatatacttatttctctgtgatgaaataaagcaaagcgatgaccggaaaagcgattccaatccataatgctgtactccatccccctgaggcatatgcccatcctccaattgatgaccctatcgcaccgcctagaaagaagatcgccatgaataatccgtttaatcgactgcgaatttcaggcgccaacgaaaaaatagcacgttgactgagcacaaggtttgcagatacacccatatctaacagaatagctgcggccactagaactgttataccgacgggggagctgctctgaatcatgaggggtaataataaagagacaacgacaacaacgagagcgattccagtggcaagcctggttaagcctcgatcagccaggcggccgcctattggtgcagcgactgcacccgcaatgcccaccaatgcgtagagtgctattgccttctgagaaaaatgaaaatcaggaccggccaataataaaggaacggtagtccagaacaagctgaaagctccaaatacaaacgcatgatagatggcacggcggcgtaagattggagtcgtgcgcagcagcttccacattgaaccgagtaaggcagtatagtttgtatttgctgttggttttctggcaggaagcacttttgataatacgatggccaggataacacttaccacggcggacaaagcgaatattgcattccacccccagatatcagcgactagactagatatcggacgggaaagcataatccgagtaataagccgctcatgacattgccaacaacccggccgcgtgcagcgtctgatgcaaggtatgatgcaaatggaacaagcacttgggctgcgattgatcccaatccgacgaaaaacgcagctgctaaaaacagtgttccatgcttcacaaatgctgttagtgtcaaagccgctgcgcttagaaggagcgatacaacaataagttttttgttttcgataatatctcctaaagggacaaggaatagtaagccggcaacgtatccgatttgggtgagtgtgacaatcaatccagcaccgcttggagaaagtccaattgccttactaattaatccgaccaagggttgtgcatagtaaagattagcaacaatgataccgcatgcagttgcgagaagaagggttaaactgggtgaaatcctctgacctgcttgtttgtttccattagccatatgaatgaactcctttttaagtggttttttgagtgtaatcatgacttctcacaagtgattttataaactgaacgttcagtttcgtcgattaataaaaataatatactaaacgttcagttttgtaaatggatttctgttttctttttttattcaatttaagtatactgaacgtatagtttatattgcgggaaggaatgatttatgtgcagagtaaacgagggcggccgcgtgatgaaggaacgcataaggcgattctctctgcagcctatgacctattgctggaaaaaggcttcgatgcggtgacagtcgataaaattgccgagcgtgcgaaagtgagtaaagcaacgatttataaatggtggtctaacaaggctgccgttatcatggacagctttctttcgaccgcgacggacaggctgcctgtgcctgatacagggtcgtcagtacaagatatagtaacccacgccacgaatttagctaggtttttgacaagccgggaaggaaccgttattaaggaattaataggtgcagggcagttggatgaaaaattggcagaagaatatcgcacgcgatttttccagcctcgccgcctccaagcgaaaggccttctagaaaagggaattcagaaaggtgaattgagagagaatcttgatattgaagtaagcatagatctcatttacggaccaattttctatcgtctgcttataacaggggatgaggtgaatgattcctatgtgcatgatttggtgatgaacgcgtttaagggagttcaagctacctctgctacagagagtatgtagctgataagaactgcaaaagctgcggattatatgacaaattggttccatcgtacgtgaaatataagatttttgttgctgagcggaatcgagggaaaagttctcttatcggatgtcgaaaaagaagtcattcaatcgtgaatacataacatcatattattacattccttttcatcgattggaacaagggttctatacttcaatggaatatcgcaaagttggagtatttaaacaacaggggaaaatcgatggccattatgtaggtgtcatggcaatcgaaaaaatacttgcaatgtaaacaggcctctaaagagacctgttttttaatatccagatgattgtctagtttcagcttgggctctatgactactcccataactgaaatagtctaatatttataccggaatatttgatgttccaaatataagggattgtttatataaataaaagtttatataatgacgggggcgctaaggaaacgcggggagcgactcaggttttgttcgaagttttgatccttaagatatacggagcgctacatatggaaacgtaaaggggaatgtagaatcatttggcgtgtatataatgatttgcttatatattgatttgggaaggaggagctcatatgacgattgatgttgcggcgatgactcgttgtttgaaaacgcttagtgatcaaactaggcttataatgatgagattatttcttgaaaaagaatattgtgtctgtcaattggttgatatgttcgaaatgagccagcccgccataagccagcatttgcggaaattaaaaaacgcaggttttgtgaatgaggacagaagaggccaatggcgttattattcaataaatggttcctgtcctgagtttgatacattgcaattgatcttacatcaaattgatcaggaggatgaattgttaaaccatatcaaacaaaagaaaactcaagcgtgttgccagtaaggaggcattagattgacatcaatgattttggcagtattcatctttttattaactctagtattggtcatatggcagccgaaaaatttatctatagggtggtcagcctgtggaggcgcagttttagctctaatagcaggtgttgtcaattttcatgatgtgttaactgtgacagggattgtttggaatgcgaccttggcttttgtggccatcatactgatatcgttaattcttgataatatcggtttctttgaatgggcagcgcttcatatggctaaggctgcaaaaggaaacggtgtgcggatgttcgtttatgtatctctattaggagctatcgtcgccgcgttatttgcaaatgacggtgcagctcttatattgacaccaatcgtattagcgatggtcagagcattacattttaatgaaaaattagtttttccttttatcattgccagcggatttattgcggataccacttcgcttcctttagtagtgagcaatttggtcaacattgtttcagcggactattttcatattacgtttattgattatgcatccagaatggttgtgccgtacttgttttcgctgctggcgagcatcattgtactttaccttttctttagaaaaagcataccaagacgctatgatctgactgaggttaaaaaacctgttgaagcaattaaagatcaaaacatgttcagactgtcatggtatatcttagggctgctgttaattggatattttgcaagtgaatttttttctatccctgtatcagtggtagcgggcagcattgcgatcattttcttaatcgctgcgcaaaagagtccggccgtccatacaaagaaagtggtgaaagaggcaccgtgggctatcgtattcttttcaattggcatgtacgttgttgtgtatggtgtccgaaatgccggattaacggatgtcctttcagatgtgattcaagccgcagctgatcaaggattgtttgctgggacaattggaatgggctttattgcggcgattctttcttccgttatgaataacttgccgactgttatgattgacgcattggctattgccggtacagatacacatgggatgatgagagaagcgcttatttatgcaaatgtgatcggttcagatttagggcctaaaataacgccgattggttccttggcgacattattatggcttcatgttctttctcacaaaggtatgaagatttcctggggcacgtattttaaaacaggaattatcctcacgatacccactttattgatcacacttgtcggcctgtatatttggctgctgataatccattcttgtttctaaaaggacaaggtcactatatcaaggaaaacaatgcactggtaactcttgacgcagccaaatggctgaagggtgggggagaaaataccttggggctaagtggaatgtgtacagcgcaggaatcgaagctcatggatgacatcgagtgctgttaaagcaatgaaagaagcagggattgatatttcaaatcaaacatcggataaatttgatgatccggcaaaagcacacggaacagaagaagtgtttccaaagggtccgtgatgaaattggtgaccgtttaaaacagtttgctgtaactggagaataaagaatcgatatactcagcgttttcttgggttatataatgcaatgtgttgttcaacaggtgtctgcgggctgagtgcaaacacctgtttttgttttttatttgtctgagattcgtaacagggaagttatttagctggtgacagaggaaaattgattttgtgaacagaatcatgaaggagacggtgttttaaaggagttgtctgttttgcaggaattaacaaaagaaaaatacagtagcttaaaaacaatgtttgatgacaaatattgtcccacatttgtctattcaatattagaccaaaccattccgggagctgtttatgcagatgatcaaacctttcctaaatcgttttttataggaactgaatcaggcatttattttattgcgggagaccaagggaatcgggattttcatgatttcattgcaggatattatgaagaacaagtgaaatcatcaaaacgatttaccttgttttcttccagtgatacatgggatagcgtactgaaacccatactgaaagatgacttaaaccaaatgagaagagctgcattttcttatcaaccaaaatctttcaaaaagactttgcaactgccaaaggggcttgtattgaaaagaattgacgaagacatcatttcacatagcacagcgtttaacagcgcgtattatgaggagtattggaattctgtctcacagtttgcttcaaaaggttttggatttgccgtattacatggcaatcacgtagtaagtgagtgtacctctatatttttagggcataatcgagcggaaatggatatctatacacttgaagaatatagaggactggggttagcttattgcgtagcaaataggtttatagcgttttgtatggaaaatgggattgttcctagctgggattgtgatatttgcaacaattcgtccattgcattagcagctaaactagggtttaagacggtaacggaatacactatttactactctggctaaccttaatgaaagaaccttaaaaggagataccaaccgatgttggtatcttttttgttttagagtttttttacccttttagcagaaaaatgggtgatgaaaatcttattcattttatttacttttaggtaggtaaaacataccccgccaactgtaaccactccgcctagcagagagagcagtgtgggtatctcgccgatccagagccaagatatgatcaaggctaaagccggtgtaacataaagtgaaagggttgcttctgaagcaccgacgagtgaagtgacatatgctagtgcgaagtaaggaataaccgtcggcaataatcctaagtaaacgatagacaaagttgcgcttattgaagcgttcatcatctcttcgcctaagcctggcagaaacacaagcataggtattgttccgccccaaatggtgaatgtaacgaatggaataaaaccatatttttttatatagcgggcttgaaaaacgaaataaatactctccgaaaatgctgccagcaggatgaccaagataccgctcattgaatatgtaaagtctcccgccccaaatgcaatcaataatacacccaataaactgatcatagagccaagccatttcgtaaatccaaaatgctctttataaaacaggcgggatagcatggctgagaagatcggtgccgtagtaacgagtaagcttgcaactccggcactaactgttttttcaccgatgttcagcaaaatgtgatagaatgcaaatcctaaaaaccctaaaagaaaaatggcaggaatgtctttcaagtcgggtaggcgcatctgagtcaaaacagcaaaaagcaataatgccatagagccgattaacaaacgaaataaagcaaggtgttctggcgtgtacccttcaagtcctgcgcgaattcccggaaaagcagatgcccataaaccaatcatgagactatgagatatcattatttgaactgttttctttcgcattcctctcactcctctttacaaaaaccaaccagttatttaatgtgtttctatactaataaagatttgatgatatggcttcaaccagttcaatagattttgacccaaccaatttattttaaggagaccgattctatgagctttccagaagaaaaaaagatgaaaaagctccctaagtacagacaaatcgttcattttattaaagagaaaataggaaatggagagtggccgattggaagcaagattccaagccagcgcacgcttgcaaaagattttcaggtaaatcggagcacagtgattacagcgttagaggaattgatggccgatgggctaatagaaggcacaatggggaaaggcacagttgttatcaacaacacatggacactgatggctaagaattctgctcccgattgggatcaatatgtcacctctggcattcagatgccaagccgaaaaatcgttcaagagataaatcaatcagaatcaaatacagaccttatacagctcagtaaaggtgaactttcagctgagatttttcctttggctgttatgaaagagatgatggggaaggtatctcaacacatggaggcattcggatatgaagaaccaaaaggttacttacctttgagggaggcattaagcaactatttaaaaaccattggaatcaacgtctcatcttcttccattctgattgtctcaggagcgttgcaagccttgcagctgatatcaatggggctgttacaaagaggatcaaccgtttatcttgatcagccctcctacctttattcattacacgtatttcaatcagctggtatgaagctgactggacttcctatggataatgaaggacttttgcctgaaaatgttcatttaacaagaggagagcggggaagggctatcttatatacaaatccatgttttcacaatccgactggtattcttatgtctaaaaagcgacgggaagaaatcctagcagtaagtgagaatacacagcttcctattattgaagatgacatttatcgtgagttatggatcgatgaaattccgccatatcctattaaaacaattgataaaaatggacacgtactgtacataggaagtttatcgaaaacattaagcccaggtttgaggattggatggatcgtcggaccggaaccggtgattgaacgtttatctgacattaaaatgcaaacagattacggatccagttcgctatcccagagagtagcggcagagtggtttacttccggccactaccagcagcatgtagaaaaggttaggcagcaattaaaggtgagaagagaattggccttgagtgctttagaaactcatttgaaagaagtggcgacatggaatatcccaaaaggagggttttttgtctggataaaaatattgccttccatatcaatgaaattactttatactaaagccttatcaaaagggattctgatcaatctcggcagtatctatgctcaggaaaaagggaattatattcgcttatcatatgcttatgcatctcttgaagaccttcaaaaggggatttatgagttgggtttaatgattaaagaattggcaagcaggtaacttttatatccttaaatggatgtttcactaaaaaagagatcaagcctaatgatcgcttgatctgataataacaagggttactagaatagaccaaatcatggttcggtcttaaaataatcatgtctctgaacgaaaagtctttccgacttctcttcctaaaccaaagtagtgtctgaaattatagataagcgggctccatttggaagggttgatatggttttcgtccagaatgatactttcctcggcatgaaaatgtagtgcctgcgtctctacaattgcgaatgacgattcatattctggaagccgaatgtgtttcacttcggcttcgatttggatagggcattctttaattcgtgttggtgatactgtttttgattgtaaaggcgttaaccctgctgcctcgtatttttcttttttatatgtaaatccgagctgcttctttaaaggcggtatactcttttttccgctataagatgaaattctttcaacgttttcccataaatccgggccaggcaagtttatgacacactctttgtgtctttccaaattgtcgatggcttttcctcccagtcctactccaaggattatataatgtccaagagcccaagaagaagacataggactaatattagtggttccatcctcattcaatgtggttagaagaaatgtcgaggtaccataatacatgatcttgggtttgatttccttaaatcgacgagtgtcttgttttttgatgtccaacgttttttcctccttgtcacgcttacatttatattgtaaaggattaacatttcaactatcatcgaaatatgaatgtaaggaggaaaatcatgaatcctaatattgcaaaaatctcttcgttgctatcagatccctcgcgttcttccattcttctcagtctgatggatggaaggatacaccctgcgggagagcttgcatatctcgctaacattaaacctcaaactgcaagttttcacctgaataaattgcttgaagcaaagctgattagcgtagagaagcatgggagacatcggtattacagattggctgactcagatgctgcaaatgtgatcgaacaattgcttcatattgcgcctaaagcaaaagtcacatctttaaaagagtcaaaagagaaaaaggacttgcatttcgcccgtacctgttatgatcatttggcaggttatgtgggcgtgcaaatggcacattcattagttgagcaggggatgttaaaaaaagttgatttaaactttgaggtgacttcagagggtgctttattcttttcaaagttaggcatcaatgaagagcaacaacggaataagaggagagcctttgcccgctgctgtttggattggagtgaacggcagcatcatattgcaggagcattaggaaacgccctattggtgcgcatgttagaagaagagtggatcgttcgtatgcctaaaacgagagcgattaggattacacaaagcgggaaaatcgcgtttgaaaagcacctaaacgtgaagatttaggatgttgaagcgaaggcacgatatccaggaggaggagtaagatttgttctaatcttactccttcttcttattttgaagcagctcgattccccattgcaatagagatgcggttccaactgtttatttgattaatgatcagaacaaggtcaacataatgtttttcatcataatgttcccgcacccgatgatatagctcatcaggaacccttttagatggaatgagcgtgatgtgttcagatagttcgagagccgctttctcttcaggtaagtaaaaatcacattcattccaagcatgtaaacagtaaattcgctgttcagtttcccccattttgcgggcatcggacgtatgcatatctatgcagaaggcacagccgttgatttgagagactctgattttgattagttctctcgtcgttcggttaattgaggattgtttcgtgtatttctccatatccatcatgattttcataccttcaggtgcaatctcatagtaggacactctttgactcataaggcaagactcctttccattgaatacctagattgtatcccggtattgatcattttaccaatgtgcggtttgaatgacagctgtttcagcgtcttttggaaagaagtttctttgaataaaaataagggtagccagcaatgatgagtggggctgctaatgcaagcagtatccatgagcctgattggctgtctctagtgactctaatgaatatataagtaccgatcagaaaatataataaagcacctagaaaccaatacatgttcaatcctctttttccttgctttttggttgcgcatttttgtctgtcatatggcttaatcgatcagggttctgattttttaataccttttcggtccggattccttttctctttaatgataaaattgtgagatcaatcgatttcaatgatgatcattccttcaatgaatagtaagttccttatgattttaaaggtaaatttgaaaagataaaacgtacatagaggcagaacgttcatgtacgtttgggcaatgatcacttattggaaactctaatgtttccctgcacctgatattgttgtgttccttctcttcctataaaatgattggatacatgtatgtttgcacgttgaaatatgggttcgattttcatgaatctctattcggtgaaacaggtaaaggaagtggataaggtttgcttataaggaatccttttaaagataaatattactcacatgataggcgggcattaaacatgcttgcactcagagtgccgggcctggcttttattctcatgatctatatagcctctatcgtgctgcaatttgtttctgggggctggtccattttattgctttatgcgtttaccatattaatcgccatttttgctttgcttcattggcactcatatcgctgggttaagaaaagagtgattctgtatttcgcggtacaaggtttgatcacctttgcacttgctaatctcatgactggcttctttatacttgtcattatcggcctttatgcatttttaattggacaaatcataggaatggcagacagaagaaggacttttctcattctttatctattgctgctgctggtcataaattcggcgtttcaccttcataaaggtgaagttttgcattttattgttattgctgggccaatcatgattgtcatcatcacttatgctgcaacattttttgcccaagtcgatgaaaaaataaaagctcaattgactcttgaaaggctggagctggctcatcagcaggtagaacagctgacgctgcagaacgaaagacagcggatggcccgagacttacacgatacgcttgctcaaggtcttgtcagtttaaatatgcagctggatgcgattcatgttcatctcgccaaaggcaacacagagagagcgaaggaaatcatacaacaatcgatgaaaagagtgaaaagcacattagctgatgcacgttcagctattgacgatctccgcagcaaatcagaagaaatcggtgttttaaaagaaagaattacctcgctaatggatcattttatagagtcgacaggcatggcttgtttattagattacagattgcatcaggtgctggatgtgcgtacagctgaaaactgttattacatcattggagaatgcatgacgaatgcggcaaagcatgctgaggcgaaaacaatctggatatccatttgggatgatgaaaagggaaggctccatttaacagttaaggataacggcaagggatttgatgttgaaaaaggaaagaaaaagagaggacattatgggcttcttggcatacaagaacgcgtcagggcaataaatggccaattcaatatcaagagtacaaaattgaaaggaacacaaattgagatcactgtaccaattcagggagagatgcaagatgaataaggttttaatcgttgatgaccatcttgtcgtgagggaaggtctgaagcttttaattgaaacgaatgatcaatacaccattataggagaggcggaaaatggaaaagtcgcagtccgtcttgcagatgaattagaaccggatatcattctgatggatttgtatatgccggagatgagcgggttagaggccattaaacaaataaaagaaaaacacgatatccccatcattattttgactacatataatgaagatcacttaatgatcgaagggattgaattaggagcgaaaggatatctgttaaaggatacgagttcagaaaccctttttcacacaatggatgcagcgatcagaggaaatgtgctgttgcagcctgatatcctcaaacgtctgcaagaaatccaatttgagcggatgaaaaagcagcgcaatgagacgcagctgacagaaaaggaagtcattgttctaaaagcaattgctaaaggtcttaaaagcaaagcgattgcctttgatttgggcgtctctgagcgaacagtaaagtctagattaacgtccatttacaataaattaggcgcgaattcaagaactgaggcagtaacgattgccatgcaaaaaggtattctgacaatagacaactaaactgcatatttgaaagttgcccaaacgtacatgcccgaatgtacgtttttttcatttcattgtcaactacaatgagaaagaatgtgatcaagcaatgcgttgaaaggagattatcatgtcaaaaatgttatatacattaggaggatgggttgctcgcaatcgcataaaagcaatatgtgcgtggatcgttgtgttagttgctgcgataggccttgcagtgaccttgaaaccaagtttttctgaggatatgtccatacctgacacaccttcggaaaaagcgatggatgtgattcaaaaagaatttcctcatggtcctgataaagggagcatacgggttattttcggtgctggtgatggggagaaacttactgggaagccagcaaaaaaagcaatagaagatacgttcaaagaaatcagtaaagatgattctgttgactcgattgcaagtccttttgtgacagggacaatcgcgaaagatggcacagttgcctatgctgatatcaagtataaatcatcagcagatgatataaagaattactctatcaaacacttaaaagacagtttgaaactggctgatgatgaaggattgcaaactgagctaagcggagatgtaccgggagccgagatggagataggcggtgtctctgaaattgtcggcattatcttggcttttgtcgttttagcccttacattcggttctttattaatagcaggtttgccgattttaactgcactgattggtttaggtgtaagtattggactggttttgattgggacacaagtatttgatattgcttccgtcagtctttcattagccggaatgattggccttgctgttggtattgattatgctttatttatttttacgaaacaccgccagtttttaggcgaaggcatacaaaagaatgaatcaattgcgagagcagtgggaacagcgggaagcgcagtcgtttttgcgggacttactgttatcgttgcactttgcggattaactgtcgttaacattccttttatgtctgcgatggggctgacagcagggcttagtgtactgatggctgttttggcttccatcacacttgtgcctgcggtcttatcgattgcagggaagcggatgattccgaaatcaaacaagaaaatagaaaaacaaagcactgaaacaaatgtctggggacgctttgtcaccaaaaatcctatcatgctaagtgtatgcagcattctgattttgatcgtcattagtatcccatctatgcatttggaactgggcttgcctgatgctgggatgaaagctaaggataatccggatcgccgggcatatgacttgcttgccgaaggctttggagaaggatttaatggccaattaacaatcgtagcggatgccacaaatgctacagaaaataaggcggaggctttcgcagatgcagtgaaagaaataaagggtttagaccatgtagcaagtgtcacccctgtaatgcctaataaagaagggaactttgccatcattacggtcgttccggaaacaggtccaaatgatgtcacaacgaaagatttggtacacgatgtacgcagtttgtcagataaaaacggagtagatttgcttgttactggatcgactgcagtgaatattgacatttcagatcgcctgaatgatgcgataccggtgtttgctgtacttattgttggctttgcgtttgtattgctgaccatcgttttccgttcgctgcttgtgccgcttgttgctgttgcaggtttcatgttgacgatgacagccactcttggaatctgtgtatttgtcttgcaagacgggaatctcatcgactttttcaaaatacctgaaagagggccgatactcgcgttcctgccgattttatctattgggattctgttcgggttagccatggattatcaagtattccttgtcagcagaatgcgtgaagaatatgtaaaaacaaacaatccagtacaagccattcaggctggattaaaacacagtggtcctgttgttacagcagccggcttgatcatgatcttcgtttttgcaggatttatctttgcaggcgaagcttctattaaagccaacggattagctctttcctttggtgtgctctttgatgcctttattgtaagaatgacactgattccaagtgtcatgaagctgatggggaatgcagcttggtatttgccgaaatggttagacaagatgattccgaatgtggatatagaagggcatcaactgacaaaggaaatacagccggaaatagatcatgaacaaaagaaacaaatcagtgtgtaatagaaaaagcagatctttaatgatctgctttttttgcatatggtagtatttagaagatgaagtcggcagttaaaaggagacacttatggcgccatcactcattttcgatatggatggaactttgtttcatattggcagaagctgcatcatactagcaggcatcccaggagaagtgacatgattttttgactttgcattcactacttgatgccaaggatcttgagaatccttcttgaaaataaaggattttacaactgatcatataagaaacctaaagaaacaagcacacaaaaccagctgcgggttttgtccaagaaaaatagagtccatgagagagactctattttttgaaatgcccggctagaagtatattgcaggtctttatgaatgcaaaacactatcttataagcccttaccgtgaaatgcctgtttctgcattgaaaaaacgcattacacgttcatttacgtaagcgggttgttccatcgataaaacatgtccggcatttttaatgacttccgcctcaatatcaggaacgaatgaagaggctcggtgcagggctgagtggggatcatagatgacttcatgttcaccaagtaataataggataggaactcttgctgaacgtaattcctcatcggtaaaaacatacggaaatccgtctgctttaggatttggatttcttgatccatcctgccacattacccctgcctgaaactgcttcacaaaaatcgggtgcagcacattctgatcattcatcatccaatttaagaatgtttcaactccatttgacgctgtaaggccaagagcgtatttgtagaaatcgtgatgaaatggcaaaaacgtttctgccggactcagtatagctgcgctttttactctctcaggcatacgtaaaaggaaattcatcgtatggagaccgccaagcgaaagtccgatcatgtgggacttttcgatccccagattgtcaaacacatcaagaagccaattggcgtaatccgttcttgtaccgcttaaattctcaggaatactcttgtttttatcacctatgatatcaactgcataagttctgtatttgctgctccaatcggcgatgttgggataccacatcgtcgagctgaataatgctccgtggagtaatacaagcggcggggcatcctctgggccgcttgcaatcacatgtgtttgaccaaaacgagtagatatatagaatgatttgcaacggaccggccaaagactaaggctttcattataagtttgataatagcggataccgttgtcacttaattcgggaatactagatgaatggtttgacatacaaatgcccctcccaacattgtttaaatgaatgtgccgtttcgtgatggggaatctgattttgatataacagactttatttacaatataatacagttgttgttagacgtcaaatccaagatgaaaaggaaataaaacgattggaacagattattgaaaatcaatataacagaatattaacctcctttgtggagccgcttcattaaaaccgcaatccaaatgcatgaatcacaaaaatcacaacaggagggatcaagagggaaggcagcaaattcaatgttttgaacttcttgattccaagaatgcttagacctgaactgaggatgagtatgcctcccacaattgtgatttcattaataaggtctgtattgattgcgctctccattactttagcaaataaatagatggagccttgccaggcaaataatacaatggctgcagccgctattccaaaaccaaaagttgaagcgagcacaatggaggtgatcccatctaacatcccgtttgtcaggaggtatgtataatctccatgcaaagcggcttcaacagggcccaatattgacagcgaacctatacaaaataataagaccgcagtagataagccctctgctaaattacttttagaaaatttgttcaccagcttgttgaatcgtaattctaaattgatgatctggcctagcaaacctccaatggctaaactcacgatgaatagaatggggtatttactatcaggcaaatgctgtgtaatggcgttgatccccagcgcgactgcagcgaatcccattgcctgcatcaaaatatcctggtattcatctttaatgccttttttgaatatccccccgattatgcttcctgcaatgatcatcactgtgttaaaaatcgttccaaacataagctttctcctccaaaaatcattcctgcataaaaaataaaccctctagttagtagagagtcaagggagatcaaaacatattcatgagattatttgatgggcagcaggatttcagtcacgtaattatctaggttattcgtaatgccataatcaatgagtgtgatttcgattgagtcccctgctacttcataatgatgttctttcatatatgccagtaattttttgtagtatggttcggcttctggatgtgaccctttaaacctaatttgcagatattctcttgaaggaaagatgatttctgaagaagttttttcattttcatcttcaagaatcataaatatactggaatatttgtcaaactgttttgctttcacatttgctgcagaaatggataaaccgatcttgcctatgaatatatcttcgtttacattcaggtgggttctcaattcagctaacgaatgttcgatatcatggccgagaacatattcatgctgcaagtaagccacacgcattgcgggaagtttgatttttgaaatttgatgtaacggcatgttaacggcatcttctatatgtgtgatgcgtcgggagatctttcgttcgatgcgttccaattctttctttttgcgatcaatttcagcctgctggctttttagtaaatgaagaagagtgtttgtattttgagagttataaaaatcaagaagcttattgattggcaggcctagggccctcaaatacttgatggtatcaagccgctcaaactgttgggtagaataatatctatagttcgtttgctcatctttatattccggtttcaaaaggccgatttcatcataataccgaagagcagagattttcacattgaataactttgacacttctccaatcgaaaaaaattccttcattctaacaacctttctgtgcctatgattgatatacacacattatatagtacggcgagttctaaaggtaaagtttgcatcataaagaaaaagctccttctaaaaaggagcttttcactcttcgaaataaggatttacatggatgagcacttcttctacatctgaaaactgtcttttgatttcatttcgaatttcgcgggcaatatcgtgtccctgcttaattgtcaaatcatgatccaaagataaacggacatcaagcaatttatagtggccatgttctcgcgcgcggattctatcaattcgttttacttgatcacattgaaaaataacagctttatattcctctatcagctcgggatcaacactcttttccatgagcacatcaacagacggcctgattaattccattgaaatcttaaaaatgaggtaagcaacgattgcactggcaatggcatcggcgtacaacagataggaccatccgcgggtgtttccgatgatagccaacaggacgccgataaaagcggcaagagaggcaacgatatcgcctttatgatcgtacgcaatcgctataatcgctttgctgttccatttttccccttgctttatagaataacgatataagatttccttagccacgtacgaaatcagagccgcaaacaatgcgctgtattggggaacgcttggccctttaacaaaggacagaatcgcttctatgaggatataaacggatacgatcactaagataattcctacaatcgcctcactaatgacttcagcttttccgtgaccaaaaggatggtcttgatcgggcggtttattggaaattccgatcactgccaagactgcaatcgaagcaacgacatctgccgcggaatgtattccgtctgcaaacacggcttcactatcgcctaccagcccaaaaaagacctttcctgccattaagatcagattggcgatcaatgcaatcaaagcaacttttctgcttatttgttctctttcacttgccattttttcctcctataaaactgcacaaaaaaataggagtgctctatatacgctctccgtatcctttcctgtgtaatcactttgtttatcataccaattcaatttcgagtgggtctatagcaacgttgtttcctgtttactaataaataaggtgacagaaaaaaagttggagctatgctaaaaaggtcatacagcaaacaaatgagttcttatgtaacaacagtgatgattcgctattaaaatgctgccgtcagtgaaaaatttccacctaattttcaaaaacctattgacatgagaagatctgtattttactattatctcatattcaagatattttaatttgagatatttggtcggaaagatcagcgatcaagcgcatctctaagtgttcaatccgttgtcatttcttttacacaatattcaatatggattttttataataaaatatctcgaattcgagataaaagggagtgtatcgtaatggctgaatttatacagttagtcaatgaaagacgatctgcaagcaattttctttcaggtcatccaatcacaaaagaagacctcaatgagatgtttgatttggttgcattggcgccatcggcttttaatttgcagcatacaaaatatgtggcggttcttgaccaggacgtaaaggaaaagctgaagcaggccgcaaatggacaatataaagtggttagctcttctgcggttctcttggtattaggggataagcaggcatatcaacaagcggctgatatctatgaaggtttaaaggtattggggatattaaataagcaagagtatgaccacatggtgcaagacaccgtttcgttttatgaaaacaggggagaacaatttaagagagatgaggcgataaggaatgcttcactttctgcgatgatgtttatgctgagtgctaaggaaaaaggctgggatacctgcccgatgatcggctttgatgcggaagccgtaaaacggattttgaacatagacgaccaatttgaggttgtcatgatgattacgattggaaaagaaaaaacagagagcagaagaccgcgcggctaccggaagcctgtgaatgagtttgttgagtatatgtaaaaggagcggataaaaatggctaaaaaaacgatgggaattcatcatattacagcgattgtcggtcaccctcaagagaacacagatttctacgcaggagtgcttgggcttcgtttggtcaagcaaactgtcaattttgatgacccaggtacgtatcatctttattttgggaatgaaggcgggaagccgggaacaatcattaccttctttccgtgggccggagcccgccaaggcgtcattggagacggtcaagttggcgtgacttcgtatgtcgtgccgaaaggggctatggcgttttgggaaaagagactagaaaagttcaacgttccctacaccaaaatcgagcgctttggggaaaaatatgtagaatttgatgatcctcatggactgcacttagaaatcgtggaaagagaagaaggagaggctaatacgtggactttcggagatgtaacgcccgatgttgccattaaaggttttgggggtgcaaccctattatcagcgcagcctgacaaaaccgctgaccttttagaaaacatcatggggctggagcgagtcggcaaagaaggagacttcgttcgttatcgttccgccggtgatatcggaaatgtgattgaccttaagttaacgcctattggccgcgggcaaatgggggccggaacggtgcatcacatcgcttggcgggctaacgatgatgaagatcagttagattggcaaagatatattgcttcgcacggatatggtgtaactcctgttcgggatagaaactactttaatgccatttacttcagggaacacggggaaatcctgtttgaaatcgcaactgatcccccaggctttgcacatgatgaaacacaggaaacaatgggcgaaaaactgatgctgcctgtgcaatatgaaccgcatcgcacacaaattgaacaagggctgctgccgtttgaagtaagagagttagattgatttgacacataaaaaataaagaaacatatattcaattgatgattgctggataccgtcagcaaagaattagataaaatcaaagatgaggagagatacaaatggaagatgcaggactgttgcttattcgtataatgattggtgtggtgtttttgttttatggcacacaaaaattattcggctggtttggcggatacgggattaaaggaaccggacaatggttcgaatcaattggggtgaaaccaggaaacgttgcggccgctctatcaggtcttggggagttagtaagcggaattctatttattttaggcgtattcctcccgcttggagctgctatcataacgatcatcatgttaggtgctatcgtaaaagtccatggagcgaaaggttttgcgaatggcgccggaggttttgaatataacctggtgctcattgcagtttccataggggttgcactcatcggttcaggagcttacgctttgcatttttaatacgaaagtatgtaagaacagttgcagcttgtcggtaactgttcttttattttgacattttcggcaagcttgcaggtactctgcaaagcaaaaaagcggatataataaatataaatctgtatagtgaatgatacgtattgatgagcttggtcatgaaaaacagacctatttgaaggagtaaatggatgaaagagatgacagaattacattcattagtttttatagaaaactttatcaaacagcacaaattcagttttatttatatatcaaggcctggctgttcagtatgtcacgcagttctgccccagctcagaatagtattggatcagtttccaaacatcaaattggggcatatcaatgctgacgatgtagcagaggtcgccggcagattttcagttttcaccgttcctgtgcttcttttgttcattgatgggactgagtttctaagagaagcccgttttgttcattttgaacagcttgaacaaaagctgaaaagggtttatcgattatatgaaggcgaataaagaaataaggcaaaaaaaagaactcaaatgagttctttttttttgcatcaatttattcttcactaggcgaagaagggttatcaacctgcccttgatcacttgtatcattatcacaacttgctgaaataataattgaatgagaaggagagtaatctcctaatgtgaaattgacaccgtaatttttgctgttcgcagtatggctgttttgcaagttatgtccgatatctgtattggcgttttgtgtcattccatttatcgtgagatttgagatgttgatttgagatcgcatgcttcaaaaactcctttcactcagaagtagccgtcatagaggacgctggcagtctatttacttctatgatattgcgtttttatatcattgcatcaacataatggtaaaaataatagcgagtgaatgagtctcttttgaagatgatcaacctatcagcagaaataaagccgcctgataaagaggcggcagatcgttatatgtcatctatgaatttgatgtatcgtttttcgtttgcctaaaggatagaatggtcgtttttaatgatgagtaggagcctatagcagcgtagccataaaaccagcccataaatacgccagaaaagaggctgtgtcgatggcttatgaaaacagaaatgacaaggcctgttattaaggcaactgacggtacaaaagttttggggattttcaataatattttgaggatttgggttatcaatatgatgattggaacagctatcacagcatcccaaaagttcgtgtgaataattggaaaagccatacggcacctcatgaagtgtttatttcttaatttttacgctaaaagcttggaaagcagctcttggatcgcatatgttacattttgggcttgattggcggagcttgtttggcttaaagtattggattcaaaaaccaaacctgtattactcccaccggaaccctctgttgttttagacacagagaacgggctgatggaaactgcaaatccgttattaaaaacgctgttcccggatatcgaatgaatataaactgggaatttcatcattcatctctcctctctgttatgactgtttatacaatatggtgtgtgagcagcagttgcttaaacaaaacggcaaaaactttcagtaagagacaaaaacctgcaaaatgccacaagcgccttttgttaatgcagctttttagggacgttttttttattttttttaccaacttcatcaaaaatattctgattgccagactgggcttgtccatccttatttatgaaatcggggtgaatgagttttttcagatccctgactgttaaaggcttggcgtcatcagttaattctattcctaattgcccgtttgcctctaatgtcgcaattttgacatcttgtatagccgtaacgccgtgaagccttagctgcatttcaagctggtcagctgtaagtctcatcttctttaagttttcgatatgaagctgtccgttttcaatgacgatttttgcttttccggttaacatcttttcaatggtgttcgatttcatttggatccattccataacgatgagtgtgcttgtgaaaattgccgctgcaattaatgttttgaagaggctgtactcgatgattggctgaacgataatagttccgatcgaaatcatgacaaccgtttgagttgacgtcatttgtgcgattgatttccttcctgaaattctcagcaaaatgaccccggctacaatgagaacaagagattcccaagtgaaattcatgctaccacctgaccaatgatgaattagatttgtcatgggattggcttttcttccggccaatcgcaatttaatatatccgaaaggcagtcggttcattctgtcctgaaccgaacaatatttttggtatagatggatatattaagccaaacaatgatagcaacaggagttttttggccgaaacaatctgggaagcggggagcgccataacatgattgaacttgaagttgtcattagaacggttgccagctttggcttgctgttaatcgcagaacgaattttaggcaaacagacaatctctcaaatgacgatttttgattttattgcggcgatcacactaggggctattgctgccggattagcttacaatacttcaataaaatcgcacaatatggccatttcgtttagtatttttgtgctaaccatttttctaatttcgtttctgtcgataaagaacaggaagctgaggaaattttttgccggagatccaacagtgctgattcaaaacgggaagatacttgaatcaaatatgaggaaaatgcgttacacacttgattatttaaatcagcaattacgggaaaaagaaatatttaatatcgaagaagttctttttgccattcttgaaacgaatggtcagctgactgtgttaagaaaaccgcaattccggcatgtgaccaaacaggatttaatgattgcggtaaaccaagaacaaaggcttccgatagaacttattatggacggagaaatcattgagaataatttaaagcagaatcgtttgacggaatcctggcttttggaagaattgcgaaaaagagacataaaggtgaaagagaccgtgtacgcagtgctgctgggtaatggggatatttatgtggatcaatataaagaccatatatcagtccctatggataaggaatgaaggaacaatcaatcttaaagctccttattgaacgcaatggtttcaacttgtcttgggtacgaaatatgcagaagcccgtttaacagctgaatctgtaacaaatgagtttcagcggcttcgggaagctgaatgattcgctcaatttctccgtaataccgttcacgcagcacttccatttcggctggaaaaacaggcgtgatcgttcctttgatcagcagctgggttttagacagtaaacggatcgttaattcttcctcatacacaccgggcatttccacaatgataaaattatattcctcatcttgataaaagtcgtaaacaaacgtagaagcttcggaatcaaaaaaatgttccggggctttatatttgagcacatttgtccaaaagtcactttgtttatattcattcgtaatctcaagccactttcgaattttttcgaaatccatatgagattctccttaaatttgatttgaaatcggcgcagaagggtttccgatttggtcttggtcactaacgtctgaatcaatatttccagtgttcaaaagtgaagacgtaggcgaaagatcccctaaggaaaagtttgctccaaaatatttgctgttcgcagtatggctgttgtgcacagtcggaccgacatctatatttccgttttgcgtgacgccgttgatcttaatatttgcgatattaatttgatatggcatagacgaaacccctttaatctaaaattggcggtggtgcaatcggaggagcattaacgttggatgtatcagagttgccgatagatgtctggtcatttacatcaggatcgtttaagaagttttccattacggattctgtaggtgatgtatcaccgaaagaagagttggtcccttgagatttttgattgttggtagggctgttataagcagcttcgcctattgtaattgaaccattgcccgaaatactgttgatcttcaaataatataggttgattactgtagacggcatcccatcacacccttccatctttctgtacagtacattatgcgccgctgcacccaattgttccttgcatttacgggcaaaactctatctggccctggagtgatgctcgttagaaaaaaagaataaagtttgtcacagcctgaatgtcaatctatttggcaaatacttatcagtgaatgaaaagccattgatataggaagcaatgaattgattcagttattcgaaatgcatgagaccctttaataaagaaagctggcaaacaggatcagtttgaaattattgacaatgaagcaaatgccatgaaataatactcgtgagtaacattacttgcgagtattatttttgggggtggtcctcgttgaaaagtaaaaaaggacgtaaaggggaagaaagccggaaacggttactcaaagctgccgctaatgaattttcgattcggggattccatgacgcgaaggtaagtgaaattgtgaaaaaagctgggttcacgcagccttcattttacctgtactttcaaagcaaagaagccatctttgccgagttaataaccgattttcactctcgggtcaaaaagctgacagagtcacttcttctggaaaacggattaaacacggaggatgtgtcaaaacgggtactgctagctgtagagactgtttttcagtttttggctgaggacaaggatttaaccaagatcggcttttttctcaacccggaagcaaaacaaatgaaaaaagacttggcgatggttttgaaagagaacttagaagcagaacagcggcttggctattttcactctgaactggatatggaaactgtcgctgagtgtttggtcggcatgattgaacatttaaccgattcatttttgttaaccggaatcaaagatccggcaagcctcgcagcagaggttgtgaatcttttgatatacgggatgcttccgaaagggaatgacgtaagatgatatctattattctgaaagtcagtttggcagtttttatgcttgcgggaggcatcataaaggtaagccgcgttccctttcaagttgagcattggcggcattatcaatatccattatggtttctgactgttactggcattcttgaaatagccggggcacttgctatgacagcgggaatttggaatcggtatgcagcgattggagcaggtgttctgtttgtcgttctcatggcgggagccattcatgcgcatatgtttcgagcaagacaatcggtcatcatggcgataccagcgatgatttgtttgattgtttctatcatgatcatcatggggagttacacgtaagcttttcactaatgtttaagaacaagcccatttgcaggaaacctcctgttcttatcgaataatagaaagtccaggaattaactgaagcagtaaaatagagatccatttctgcgttattcgtccggcatcagctgggctttttttataaaggaggaatacaggatggcattaactttggaagacatgactgaggaagagttcgaagcctttcgcgggatgtccgtgcaaaattttgcgaaacaaaacataacttcaggaacttggacggaaaaagaggcatttgagaaatcggagcagacatatgagaacatgattccgaatgggcgagacagcaacaatcattatttttggaacatcacaaatgaccaaggggaaagaatgggctggctctggctgtacgctgatccgtttcatccgcaaaaggaagcgtttatctattcctttggattgtatgaagcctttcgcggaaaaggacttgctcaattggcgcttcaaacgcttgatgaaagagcaagagagcttggtgcggaaaggctggctctacatgtatttgcacacaacgagacagccgtctatctttatcagaagatgggctatgccttgaccaatatacgtatgcggaaacagctatgctgaaaagtcgcttacgttacccaaacacaagatgcctatctggaagcagtggcagggtactataagtcatcattagaaacattaaggtcatgggaaggcttgaacatataaagaaaaaaggacaacagctgttgtccttttcaatgccgcttgaactttctccctcagtcttttttgtcttgatgatccagctcttttattcgtttcgtaagctcattgaaagcctgatcaagctccttataccctttatcatttggcgtcataaaactgagctttcccagcacttcttgtctttctgtctcaagctttaaccgaagctcctcccgctcatttctttctgaaggagcgtcgtttaactgcttttcgatgccgttgtttgagatgacgagtttactgtttgttgttttttcgagaaagtatcggtcatgtgaaaccgccagcaatgtgccgctgtattgtgacagtgtttcttccagctgttcgcgtgacggcaggtcgagatggtttgtcggctcatctaaaatcagcacgtctttttcctccagaatatatgccatcagcttgatctttacacgctcacccatactcatatgcttgatcggttcagtccattggtcggctgtaaaacctaagtgcctcatcagattttgaacgtgcccccttgctttgaatgtttcattctcaaataactcttccggtgtttgttctaaaggcaaatcaaacacctcctgcgttaaatagccgatgtttgcggacggcgacacccatacgcttccttctgctgtttcctgtccaagaatgatattcagcaatgtcgtttttccgctgccattggggcctatgatcgcaaccttttcgccgtgctgaattgtaaagtttgcgtttttaaagagagtcctttctccaaacgcttttgttacattctgaacttctaaaaaccgtttccctgttttgtgggttgtatcgattgaaaagcggactgtatattctggggtaacgggttccgcctttgctttttcaagctctttttcaagccgcttctgcttggattttatctgggcatccgtacgcttcgcttttacccggtgatattctttaaacccttcctttttcgtcgattgagcatgggctttttccgaccaagaagcgagctcattcatttgtgcttcaatccgttcaaccattttttgctgcttttcatattcacgctgctgggtgagtcttttcttctcccggaacttcatatacccggagtaattccctttgaattcaatcagcgtctgatcctcaagcgaccatatttttgttgcggcttcgtctaaaaaatatcgatcgtgagaaacgagaatcacagtgccgttataatgtttcagctgttggatgagaaattgcaagcttttttcatcaaggtggtttgtcggttcatctaacagcagcagatctgcatcctctgatagtcctttcgccagccgcgcttttagtttttcaccgccgcttaactgatgaaaatcacgaagaggcacatgccatttctccagtaacttcttttcggcaggtgtctgatccgcaaaggaatatgccgctgtttcctgttcaaccaaagccagttttatatcctttcgaaggatttgaccctgggaaggggctaagtcattgtgaatgaggtgcagcagcgtagatttcccagcgccgtttttgccgataatcccaatgatatctccttgctgaacactggcatttatatttttaaaaacagtcagatccttcacttcatagctaacgtttgttaatgttacgatctctttcatccatatccctcgctttaaagggagaataaaaaaatcctcccaaatgtgttggaaggattagccgtgcctgtgcatgatcaaataagctattttttataaatagcaggtcgtatatatagaaaatgggcagactaatcctattttttgatttgaaatattgatttcaaacgataaaaataagattagttaatcattgtccacccatcatcccttcttgttttgattacaaacactatagcataccttcaaattcaaaagcaaaggtcattttcatcaaaaaaactcctgctctcatttttgaggcaggagtttcgagtgttattgatgcttcgcttttctcactttataaatcacaatcagcaaaataaaccaaaccggtgtgacaaataaggaaacacgagtatcctgtgccagtgccagcacaaccagaacaaacgccaggaacgcaagaatcaggtaatttgtaaacggataaagcggaagcttaaacttgtttgttttcgctaattcaggtcttgttttgcggtatttcatatggcagatgaccgtaattccccaaatgtagataaagcatacggttgaaatacttgtgatcagggtgaatacgccttctggcatgatgtagtttaacgtaacaccgattaaaatcacgatagctgaaaagaataaagcatttcttggcactttacgctgagtcagtttcgccattgactcaggcgcattgtgatctttcgccagggaatagaccatacggcttgtactgaatacagcgctgttgcatgctgaagcagcggaagtcaatacaacaaagttgataatacttgcagccccgacgatgccaaccgcgacaaatacttgtacgaatgggctttcgctgggattgatgacatcccaaggatagatgctcataatcacgagaagagccccgatataaaaaagcaacacacggacaggaatattgttgatcgccttagggattactttttcaggattttctgtttcaccggctgtaagcccgacaagctcaatgccgacaaaagcaaacacaaccatctggaacgagaggataaacccgtgcatgccattcgggaacaggcctccgtggctccagagatttgtgaagctggacactcctgagcttgtggaaaagcctttgaaaatcatcacaaggccaatgacgattaacgccaaaatggcaatgactttaatcaaagcaaaccaaaattctaattctccaaaaagcttgactgtcgccaggttcataatcagtaaaataattagagcgattaagccaggcacccattgcggcacacccgggagccaatattgagtgtagagcccgactgctgtcagatcagccatcgcaatggaaatccagcagaaccaatatgtccagccggtgataaatgctgccatatcgcctaggtagtcttgtacaaaatccacaaaagagtgatagttcaagtttgataacagcagttcacccagcgatctcataattaaaaagcaaatgatccctgtgatcatataagcaaataaaatcgaaggtccggcaaaatgaatcgatttgcccgagccgagaaataagcctgtcccaatggctccgccgatggcgatgagctggatatgcctgtttttcaagcctctctgcaacgtttgctgatttatattgtctttcgtcatgtcgtctgtcactttatgtgttcctccattgaaaattgtttattgagtcagcaatctatttttaatgattattataacactaaaatttctatcttttttactaaaaaaggattgatgaaaagaattttaatgtgatttggactatttcccgaaaaaagcggctccatttagggagccgcttttttatgctttttcagtttttgtcataaacaggtagagcccgtaatctgtcggtgcggatgcgtagcctgcctgccgcagcattgctgtgatattgccacggtggtatgtcccgtggttgacaacgtggggaagcagttcggaaacagttgttttcatgattccgcttgagggattctgaatctggagtggcttattgagctgttctttttgctgtaaaaatagtatatagcgctcggataacctcagaaaaaggtcttccatttcctctatttctttagcctctgtctgttctttaagctgttcagctaaagccaacgcatcgctcaaggttttgccggaaaacacttcaatccagccgagatcagaaagataaacatgagacaatacatgggatattgacggaaacacgctttgaatttcttgatggtatacctcttttggaagctcttttaatcggttgaatatttgttgattggcccagacgttatattcatacaatttgaatgcaaaatctgacatgttaaaattccccctttcgtgtgtatagcttccattatacacgaacatgagttcttatgtagagtgctcaaaaataaaatttgttgacatatatagtttagaggaataaactaattgacattgaacataaagtttagcggggtaaactataatgaggaggggaagatattgaatgaacaaaagctatgtcaggcgataaacctgtttgtggaagtcctgcttgaagggacagaatttgtacatcgtgaaatcaatcaggatgtcttcaagcatatctcaagggaacaggcagacctgttgaaaattttaaaagtcaagggcccaacctctcccggcagcctggccatgtaccaaaatgtacataagagcgcgatctctaacagactgaaaaagctgctcgaaaagggattggttcaatgggacgactgtctggaaaaaagtgataggcgctctaagcttattaacattacacccagtggtgaacacatactagaagaattagattctgccatctttaacgcgctcaaaccgctgattgatgatatagatgaggaacacttacattccatcatcgagatattcaccattttaaaaagcaaatttaaaggaggagattctgccgaatgagagcaatcatcaaattcaagtgggcaattgcagccatagtattagcacttaccgtcgttttgagtttgttttctccgaacttaacggagctggccaatcaaaaggggcaggcccagcttcccgctgatgctgtttcagaaagggcaaacgccattttaaaacaagcgggagaagacaataattcgatcagtgttgtctttacattagacaacgctataaagaaagaaacagagaatcagctccggataatgattgataaaatcaaaaagatcgacggtgtagaagaggtaacatctcctctgtcagcggaaaaagaagtcaaagaccagttgatgtcgaaagacaagaaaaccgttctcatgcctatcacgattacaggttctgataaaaaggcggaaaaaattgcggacgagatttatcaaatcgttcctgatgacttgacggcatatattacgggagcttcccttatcaaccaggatttcgctcacagctcagaggaagggcttaagaaaacggaagtgatcacagtctgcctgatcatcggtttactgttgatcgtgttccgatctgttgtgacgccttttatcccgattgtggttgtcggtttttcttatctgatcagtcaatccatactgggcatccttgtatacaatgttgattttcctatctcgacgtttacgcaaaccttcttagtcgcgatcttgttcggcattggaacagattactgcatactgcttcttacacgattccgtgaagaattggcaaacgggcatgataaaaaagaagcggcgcttatcgcttaccgtacagggggaaaaaccttatttatcagcggttttgcggtattgatcggattttccgccttaggatttgcgaagtttgcgattttccaatccgcagtaggggtagcagtcggtgtgggaattttaatgattatcctctacacactgctgccattatttatggtgacgctgggtgaaaaattattctggccttctaagaaagtgctgtcacacagtgataacaaactatgggcgtttctcggcagacactccgttgcgcgtccgtttctgttcattgtcatcacggtggtgattacgcttccgttcatcttgacctatgatgaccagatttcattcgactcaactgcggaaatcagcagcgattataaatctataaaagctctcgaggccattaaggatggattcggggaaggaaaagcgttcccgatcaatgttgtcgtaaaaggagacaaagatcttacaacagctgatacaatcccctatctaggaaatatcagcaaagcgatcgagaaagttgatcatgttgactctgtgatgaccattacgcagccgactggtaaaaaaatcaaagatttatatattgataaccagctaggatcggtttcagacgggctggataagacggtaaaagggattgccgatgtccaaagcggattaacggatatagaaaacggactgaatcaaatggcagggcaaaccggctcggcctcaaatggagggtctggcggttcactgggcgatgcggcagatggcttgggcaaaatcaatcagcagctgcagctcgtgagcaaacagatttcccaaaccggcaataccgcacagaccgtgcagcagcttacggcaatcagcggacagcttggccagattcaaaccggtcttgaacaagcgaaccagcagctctcaggccagcaggcacaagccggaacgctgacagaaagcctgaagaagctgtccgaaggcgtgaaaagagcaaatcagggcctgacgaaagtctctgacggtattacagcttccagtgatatgttagaggatatgagcaaaagttcaactgtaagagatacaggcatattcattcctggtcaagtaatgaaggacaaagactttaagaagtcaattgaccagtattcctttgcagacggcaaaggtgttcaattaagtgtcgttctggattcaaatccgtactcagaacaagctattacgacaataaaccaaatcaaaaaagctgtcgcaaacgaagttgacggcactcctttggaggatgcacagatcgtatacggcggggtcacgagtatgaatgcggacttaaaggagctgtccacaacggacttctccagaacaatggtgattatgattataggcctgtttatcgtgttaaccattttgttccgctcaatgatcatgccgatttatatgatcgcgtcattgctgctgacgtactatacgtcgatatccataacagaattaatttttgtaaacggcttaggaaacgcgggtgtcagctgggcagtgccattcttcagctttgtcatcttgatcgcgttaggggtagattattcgatcttcttgctggatcgatttaaggaagaggtgcaccttggcattgagcaaggtgtcgtcaggtcaatgagcaaaatgggatctgtcattattacagctgccattatattggccggtacgttcgcggcgatgatgccttcaggtgttaatacactgatgcaggtggcaagtgttatcatcatcgggctcttgctttacggccttgtcattcttccgcttttcatcccggcaatcattgcgacctttggagaaggaaactggtggccgttcggcaggaagaaaggaaaagagtaatcgagagaagagtgatgaatggtcatcactcttttttcatgatctaaacgacgaacttcagacgtgttacccaaaaaaggtcagacgatcaaacggcggctgggtacttaaaaacaaagagcccggaaaacattcccgggctctttgttttatttccattctgcaattgtatcaatcggcagacggtaggaagcatagccttcgtctgctgcttttccgatagaaagtagcataaccggtacataacgttctttatctaatccgaaggtttccgcgatgttttctttatcgtatccgccgatcgggtttgtatcgtagccatgcgcgcgtgcagtcagcatcagctgcatggaaacaagacctccatcaatcaggatcgtttcacggttgacctgtgccggaagcttttcaaaatgtgcggtcagcgcggcgatttgtctgtctttgacctcctgcggcatgtaaccaagttccacggcttttgaatagatttcttctaagtagtctgcattgttcatgtctgcaaatacagcgatgacagcagatgatgttgtgacctgtgtttggttaaagcttgcaagcggtgcgagcttttcttttccttccgggctgtcaatgacaagaaaacgccatggctgcgcgttaacagaagatggggcagttgttgcttcctctaagatctctgtcatttcttctttgctgatttttactgccggatcatagttgcggatagaacggcggcctttcataatttccataaaatcgtttgttttgatcatgttgatacactcctcttaagcttcgatattatttatattgtttcgcatgcgcgccagcacatcaatgagcaggcggcgttcttctgcgcttacatttgcgagcatttccttcatgaaacgctccttttccttcttagaagactcaattcgctctcttccttggtctgttaaccgaacaagggtgatgcggttgtcctcaggcttgcgccgccttgataccatgcctttggcttccagctgtttcaggtgtctggtaacggctgcgctatcgatatttactttcttttgaaggtcgctttgactgatctcatctgcatgataaagcaatgtcagcaattccaaacgagattggctgatgcccgtgcatgcctcgaacttcacgccaatcaccttgttcacgccttgcagctgatataaaatctcggcttcctctgaacaaaatgacgccaaaacccatcccttctttcctgtcaaaactattaattgatatatcaatgattgacacgtcaattaatatacaacgattgatttcatcttgcaagccatttgcacttttgaacaacctcccagcgcataaaattcgctaggctagaacttagcaaaaaaagctggccgcttcttcagatgatgctggtcacgatgattccctgcatcattcccatttataggtgttcggaatatcactttgccgagcccgtgctcaagcggctttcacaggctgaaagttatgatacaatatacaaatgtttcacagcttcaatccatagttggagctgacatccattatataagggactaggttgaagggaaggtttgataacatgctgcacaatccaactggaaaagaacgcttggcactagcgtttctgctcggcatgcttgctatattgggcccgcttaatatagatatgtatttgccaagttttcctgaaatcgcgaaagatttatcagcaagtgcttcacttgttcagttaagtttaacagcctgtctggtcgggcttacgatcggccagctgattgtcgggccggtcagcgatgcgcagggaagacgaaaaccgctattaatctgtatttttttatttgcgttatcttctctgttttgtgcactgtcgcccaatataacaactttagtggctgcgcgttttttacaaggcttcactgcttctgcagggcttgtgctgtctcgcgcaatcgtccgcgatgtgtttaccggaagagagctttctaaatttttctcgctgttaatggtcattaccgcggtggcgccaatggttgcgcctatgacaggcggtgccattttgcttttgccgttcgcaacgtggcatacaatttttcacgtcttaatgatcatcggatttttactagttcttctgattgcattgaggttaaaagaaacgcttccgctggaaaaacggattccaagctcaatcggaacatccgtcaaaacgatgggcagcctgctgaaggatcgatcctttatggggtacgcgttaactgtcggatttattcacgggggaagctttgcatatgtgtctggtacgccttttgtataccaggatatctacggggtgtctccgcaggtatttagtattctttttggcattaacgggttggcgattatatcgggcagctttatcatcggacgctttggcggaatcattcatgaaaaaagcctgcttcgtatagcggtcattacggctatgattgcgacggctgtgctattaaccatgaccatgattcacggtcctcttgctacattagtcatatccattttcatttacatgattacgatcggcatggttctgaccagcacgtttaccctagccatggaaaagcaggggcaccgcgccggaagtgcaagtgcgctgcttggaatgcttccgctgctcctcggttcaatcgtgtcaccgcttgtaggcattaatgagacaacagccgttccgatgggagccatcatgtttgtgacagctgtcatcggctcactggcgttttttggattaacgaaagaacgagtagggcagaattcataaaaaaacctgacatgacgtcaggttttttgttttatttagaataacaacagcaggcctgcaatcgccggagtcaaaaagatggctgatttcaaaaccacctttggcatgaggttggtgaatttcgcgcctacataggccccgcacattgtcccgaccagaactttgacaagtaaaacgtaatcaacaaaaccttctgtaatatatccgatgcctccacctacagccagagggatgatcacaagcatcgtcgttccgacagaatggcgaatggacagattcagcataatcattaaaccgatttgaataaaaggtgccgacccgatgccgaatgtgccggaaagaacgccggctgcaattcctaagatgaccgctctcgtatacgttgaaagagtgctttgattcacttgagccttctcttttaaaataaataatctgattaaaatgagaattgctgataaaaataacattccagccgtcaaataatgaagcaaatcagccggaataaaagaagtcagcttggcgccgaaaaatgagccaaccgcagcaaagcctccgactattaagccgattttcatttgaatgttaccctcgcgatagtggctgtatgcccctgataagcttgtaaaagccatgccggcaagcgaagtgcctaaagccgtatgaatcgggatatggaaaagaagcgttaaaagggcaatgacaaagccggctccaccggcgccaataaagcctaaaataattcctagaagaaacataacaagaataatgagcatattttttcctccattgaaaagatgtaaaaaatgtaatcgtgcgctattctggcggaggtatggtgtcctattgacgaagaaaaacacgccgttttttcagttgccagtagtccgtcgaccgtcgttcagcaaacatatcgtacctcaaattctgggatctgacaaggcagtttgttgcttcccattaccatctgttatatgattttgatgaagaaaagcccttgaatatattcaaaagaggtattatatatggacgattttaaattagataagccgactccctactacctgcaattttataaccagctaaaaaaaatgatcttcaacgggacttttaagcctggggaacggataaacgaaacacagctggcgaaaagctttggcgtcagccgctctccgataagggaagccatgcgattgcttgagaaagatggtttgttaaaagcggatgaccgaaatgggttttcgatcacgtcgttaacggcaaaagatgtagatgagatttataaaatcagaattccgctggagcagctggcagtcgaattagtcatagacgaagcggacgaagaagagctgaccatactcgaaaaacagcttgaagaaacagagaaagccattcacaacggcacggaagatacggaaatcattcgtttaaaccaaaaatttcatgagctgctggttgatttcagccataacagacatttgaaaaatttgcttgagcatgtaaatgacctgattcatttttgcagaatccttaattataccggcgaccaccgtgcagaaacgatactgcgtgagcaccgcaggatatttgaagaagtgaaaaagaaaaacaaagaagcagccaaacagcatgtgctggctcatttcaatcatgactgtgagcatttgaagcatgtgcttgaagaaggtaaagagaattgatttgtatgatccggtaccaagggagagcagaacccttggtatttttttatgtattcaccacatatctaagaggccccgttaataagattttatgatggtttgactaacgaataatgggggttaaacatgtttatccatatcgtcgggcctggtgattctttgttttcgataggcagaagatacggtgcttctgttgatcaaatacggggtgtgaatggtttagatgaaacgaatatcgtgccggggcaggctctgcttatccctctttatgtatatacagtccagccgagagatacgcttaccgccattgcagctaaagcgtttgtgccattagagcgactgcgagcggccaatccgggcatcagcccaaatgctttacaagcgggagcaaaaataacgattccttcgatctcaaattacattgcggggacattgagtttttatgtgctccggaatcctgacctcgatcgggagctgatcaatgattatgcgccatactcgtcttcgatttcgattttcgaataccatattgcatcgaacggcgacattgcaaaccaattgaatgatgcggctgctattgagacaacttggcaaagacgggtcacgccgctggcaacaataacgaaccttacatcaggaggcttcagtacggagattgttcaccaagtgctaaacaatccgacagcgagaaccaatctggtcaacaacatttatgacttagtttccacaaggggatatggcggtgtcacaatcgattttgagcaggtgagcgccgcggatcgcgatcttttcactgggtttttacgccagctgagagatcgccttcaggcgggagggtatgtgctgacgatagctgttccggcaaaaacaagcgataatattccctggctgagaggctacgattacggggggataggagcggttgtcaattatatgtttatcatggcttatgattggcatcatgccggaagtgagccgggtccagtagcgccgattactgaaataaggagaaccattgagtttacgattgcgcaggtgccgagcagaaaaatcattatcggagtcccgctctacgggtacgactggatcatcccgtaccagccgggcacagttgcttcagcgatttcaaatcaaaacgcaatcgaaagagcgatgaggtaccaagctccgatacaatattcagccgaatatcaatcaccgtttttccggtacagtgatcagcaggggcggacgcatgaggtatggtttgaggatgtcagaagcatgagccggaagatgcagatcgtccgcgaatacagattgcaggctattggcgcttggcagttaacgctgggctttacaccgggcccatggcttctgcggaaattttttacgatcagaaaagtgtaaaaaaagacaccacaactggggtgtcttttttttgattaagtccagagcagcagaatagttcattcatttgtaccttgcataggttgtgttcccattttacgattagtagtagtctgatcaaacaaagagtcagaatacgatttgagagggagttgtctacatgaagacagtattgattttgaattttcctgcggaaggccatgtgaatcctaccttaggcattacaaaagcgttttccgataagggatatgatgtccattatatatccactgaaaaatataaaaaacgattagaagcagcgggagcaacggtccatcttcaccgggatctgctgcgaacaacacctattcatgtcggttcgcccaatggcattcttgatttcgtgaaaatccatatcaaaacgtcattggacattttacagattgtcaaagacttatctaagagcattcaatttgattttgtttattatgataaattcggcgcgggggaattggtaagggattacttagatattccaggagtctcttcatcggcgtctttcttgtttggcgaggagcacctgaaaatcctgccgctgcatccggagtctggagcgccgcttgaattggatcaagagtgtgaagatcttttggcaaaaatgaaagaaacgtacggtgttgccccgaaaaacctggttcaattcatgaacaataaaggggaattgaacgtagtgtatacaagccgttattttcagccagaaagtgatcgtttcggggatgaatgtctgtttatcgggccaagctttccaaagagagcggaaaaaacagatttcccgattgaacagctaaaagatgagagtgtcatttatatttcaatggggactgtactggatcatacagaggatttcttcaacctttgtattgatgcattttcaggctttaacggaaaagtcgtcatcgctgccggagaaaaagcggacctgaccaaattaaagcaggcgccggaaaactttatcattgctccgtatgtccctcagctggaagtgctggagcaatcggatgttttcattacacacggcggaatgaacagcgtaaacgaaggcattcatttcagcgtgccactggttgtcatgcctcatgacaaggatcagccgatggtggcgcagcgtctctctgaactccatgcaggctatgtcatctctaaagatgaagtcaatgcccaaatattaaaacaggccgtagatgaggttttgcgcaaccatcagtatacggcaggcattaaaaaaatcaatcaaagcttcaaggaatgtatggacatggaagaagtgatggagcgggttgatgagttgattcgccaaaaaaacaaataagaaaaagaactcccgtaccttgtacgggagttcttgatttaaaacttgattttgattttttgagcatcactgattttcttatggttatggtcaaagacgtcacttgtcgtgatttcgatccacttgatctcttttgttttcttctcagcatccgcggccttatcatgagcatggcggcttgatgcgttcacaataaagccgagatttccagacttttcggcgccgccttccaattcgccgtttaactcttcaagataaatatctttgttccaatcaaaggtttcgcccgtatttgttttcatcaatgcaatcggcgcaacatttactttttttgaagaggtgttcttgatatcaacgaaaaccttaacgaaatcaaactcttcatcgtgtgttaactcatgaaagtaatcaatcatgctgtagtccgggcgcaagtggatcagcttcatttcttttactgttaactccacgtcgccaatcttataggttttgttcacttgtttgatatcttttaagacagcttttcctttatcatctgaaaacgtttggccgaccttaagcaatgaccggtcatcagttacctgggaattaggctgataattatctgtgctgtccttctgggatgaagtgctttgcggctcagcttttactgttttctccccgcctgcatgctgtttttcagtactggcgtttgatgagcagcccgcaagcatgatagcaaaaacgaaaattgaaagaattcttctcatgatgattcctccattaaaaagagatcccgttacttcatacaagcaacgggacaccttgtaatcttttacttatcgttaatcttaatgttgtattgtaaagccttgaagacatttttggcgatttctgtattgtcgatttggccggcaaatgtctcactagacggaccgtatgcatagacgggaacatcttcaccggtatgtccgcctgttgtccatccagtgtgagagcgtttattaaagatgttctcgattgcgttatcgatatccagtacttccttcgattttgccgcttcttcaacagattgaatttcggcttttgttaaagccaatttcttttgatcgatatatgttttcaaagttttttcaacatccgcgccgtcagagatcttttctgccataaagtcaggtgtgcgctttgcggctttaatgggttcactgaaccagttgtagatgccgtccgcaccgatggaatatccgccggttgagtggtcagccgttgcgacaaccaatgtgtgcttgtcttttttagcgaaatcaatagccgccttataagcttgttcgaagtcttccatctcgctcatggcaccgacgatatcattgtcatggcccgcccagtcaatctggctgccttccaccatgaggaagaatccgtctttatccttgtttaattttttaatggctgtgtttgtcatatctttaagtgatggaatatccttcgtccggtcaatctttttaggcaggccgccgtcagcgaataggccgagaacttggctgtctttatttttcagcatgtccttgcgatcatccacgtagctgtaccccgcttttttgaattccttgatcaaattacggtccttacggtcaaaattgctctttcctccgcctaaaaggacatcaattttgtgcttgccgttgaccatctcatcaaaataatcatccgcaattgagttcatattttttcggctatggtcgtgtgaaccaaaagaggccggagtggcgtgtgtaatttctgaagtggccacaagtcctgttgcttttcctttttccttcgcagcttcaagcaccgttttggcttctgacccgtcgttatcaacggctatggcattattgtatgttttaattcccgcagacatagccgttgccgccgctgcagaatccgttacattttgttcaggatcatcgggataagttgtttgctggccgacaagatactgatcaaaagccgtaggctccacaacttttgtctttttattatcctttaagtatcgataagcggacgtataagacacacccataccatcaccaatcagaacaataacattcttaatttcgtcttggtttccctttttcttttcctgggcgctggcatcaggcacactgccgctggctaagctgctgaacgcaattgatgataaaaccgcgataggcagtaatttcttcgggaattttttcaactggataacctcctaaatatagatgaatctcaatgacaacccaattatatttttaaactgttaagctagtattaatcgattttaaagattggatttacaagaataatgaactgctatcaagagaaaggaaagagtgatagtactatagaaataaattggaggaatagatactggccgtggataggcggactgaaatctgctatagtcgcatagaagcaacccgcttacatctggaacaattttaagtattatgttggaaagaggtattgtgtaagcacatgtctgagcagttcatatggagtggcatcattttattttaggagggaacaacatggacgttttttctgagtatttagcgggaattgatgacccgttccaccgagaaagaacggaagaggtgttaacttggataaaaaataaatatccaaatttacatacagaaataaaatggaaccaaccgatgtttacggatcacggtacatttattattggctttagtgtttctaaaaagcatttagctgtcgctcctgaaaaagtaacgatagcgcacgtagaggatgatattgtgaaggctggatatgattacaccgagcagctgatacgtatcccttggaatggtccagttgattacacgctacttgagaaaatgattgagtttaatattctggacaaggcggaatgctccactttttggcgaaaatgaaggaaaaaggcataacatatgagctgtataaaatatgttacgccttttcatttgtctatttttcgttttgatcatctattgctgcttttcttcaaacaaggtcatttcattgagcgtaagctggctcgcagaataatgattaccttgtttccatttcacttcaatcgtaatatcatggccttcaagctcatgttcatctaaccgctctaaaaaagaaacggacttttcctttgcgcttccatcacgataagtgcctccagcataatcatgcatcgggatttccgtgtcagaactcagcagaatttcatcatccttttttacaatcagtgattccaaataagtgttgtctgtttcatgtggttcaccgatccaataaagttcgccgctgtattcattcggtgcatcttcattttttttgaaaacagcttcccaattctggtctttgctttctccctgccaattcggatactccaaacgaacatgatgaatcaggtgataggaaaaaaagatcaagcagagagcgattaataggaatgccgtgaaaatgagagggtatttataatgactggacataaaagactcctattcgtttaatcaattaccttcgaaaatagaatttcatcccgaatcaaaatgccgttttcagccacctcgggaatctccggcttgagtcggcgcgctttttcaactgcgttcggaaacacttcggcgaattgatagcctctcttttgataaaacgccatcgcatgtacattatcattcgttgtaataagctttattcgttgacaatgtgcatatttagccgtctcttcaacctgctggagtaaagctgtgccgattcctttattttcaatcatactatctaatgaaataatttcacaatctttcccatctatcaagtatgtaatacagccaatgatttcgccgctttcatttactgcggcaaatccatctaattcatcacaccgaaaaatgccgctggaaatcgccatctcgggtgtaccccaatgcttggcaaaaaaatcggtcaacatctgtttcgctatctcattgtttgggatgatcatcatcataacactcctctattgaaagattgcatatgtactatcaatataaacaatatataacaaaaaaaatagatgttgaggtgacggcatggaaatcagcgatgtcatttacgggcaccaccatatagacggagtgctggaagagcttatcaaaagcgctcctgtgcaaagattaaaagggatctatcaaggcggagcaagctttttagtcaatcgaagatggaatgtgaccaggtatgagcactccatcggcgtaatgctcctcatcaaaaagctcggaggaacgatagaagaacagattgcaggtctgctccacgacgtatcacacacagctttttctcatgtggtcgacgttgtctttgaaaatcaagcagaagactatcatgaaaacatctttcaacaagtcattgttcactctgaaatcccggacattttacaaaaacacggctatcatactgaagaacttttatctgacgattcaaggtggacattgctcgaacagcccgcaccggagctgtgtgctgatcggacagactatacgctgcgtgatatgtaccgatatggacacattaacctgcacgaagcgcaaacctttttggatcatcttattgtgagaaacggaaggatgtttcctgatagtattgaagccgccgaatggtttgtcagtgtgtactacaaggaagtaattgatttctttttgaatcctgtgaatgtatatggatatgaatatttagcgcgagcattgaaggcagcgctgcggcatgatgtcatatctgcagaggatctgctgaaaacggaccaagaggtactgaacatcctgcgtgcatcaaaaaatgaagaagtcctgagcttgcttacatccattcatcccggcatacaagtaatagaggatgacatccagtacgatttccatcaaaagaagaaaatgcgcctaatcgatccatccatttttcttgatgacaaatggatcaaatcctcagatgtttctgaaaaggtgaggaaaatgggtgaggccgcttatcaaaaagcaaaaaaaggtgtgtatataaaaatcttaaatcagtaattgccgcctgacagcggctttttttatgtttggctttgcaaacaaaggggaataggacaaactgcgggaacgcattatgagaatatcagcgtatttacataccgttcgggggtatagtattatcgagagggcatgttttcattgtctgcgggcaaaagttacaggaaaaaaatgaagcaaaggagaatgaacatgaaaatctctaaaaatgcactgggaattctgatgttatctcttgtttttgttttatcagcatgcggcaataacaacagtacgaaagaaagcacacatgacaatcattcagactcctcaacacatgaagagatggaccattccggatcagctgacgttccagagggattacaggaatctaaaaatccgaaatacaaagtaggcagccaggtaatcatcaatacttcccatatgaaaggcatgaaaggtgctgaagctacggtaacaggtgcctatgatacaactgcgtatgttgtttcttatactccgactaatgggggacagcgtgtggatcatcacaaatgggtgatccaagaagaaatcaaagatgccggagataaaacgttacaacccggagatcaggtgattttagaggcttctcatatgaaaggcatgaaaggagcaacagccgagatcaactccgcggaaaaaacaactgtatacatggttgactatacatcgacaacaagcggcgaaaaagtgaaaaaccacaaatgggtcacagaagatgagctttcagctaaatcataaaaaatcctccttttacaaggaggatttttttgctgtctgaacaggtcttgttaaagaaatgaaagcaaacaggacagcgatgatcacaattgacccgccgcaccatgctgttgacaccacagtacccgtttgatccaaaacaacaccgccaatggctgagccaagggcaattccgacttggagggccgatgtgttaaagctttgctgaatgtcagacgaatcaggtgcaatttcaattaaatagctttgctgagccggggcgaggctccagctcagaagaccccaaatcaccatcacaggcaaaaagaaaatcatagacgatgtagacagcggcagtaagaacataatgatagcaaaggaaccggtcaccagcaaaatgctcttaaaggaaccaagccggtcagatagcgctcctccgaaagggcctccgcatacggcagatatcccgaaaaggaaataacaaatgctgacccagaaagagctcaggtgaagagtctcttctaaaaacggcgcaaagtaagcgtatagcgtgtagtggccagctaatgtaaacatcgtgacgaggtgtgaactcgcgattttcagattaccgatcgtcttgagctgttcccggaaaggaatcattttctccgccggtattctttcaaagaagattgaaataatcagcatggagatcagcgccaacaggccgatgccaaggaacaaaatccgccacccgaaggaatcgctgattaagattccgagcggcacacctaatgcgatagcagagctgaaacccataaaaataattccgattgcgcgggctctgtattcaggcgctacaattttcggggcaatcgttaaagaaagtacaacaatcagccctgtactcatcgccgccaataccctagataccatcaatgttgcgaaattagggctgaagtaggcgacaagattgctaaggaagaaaacaaataaagcaattagatataagcgcttccgctcaatcttcgcagtcaatgccaaaagcagcggcccagatactgcatatcccagcgcaaacacactgatcagctgtccggctgaaacaatggaaatgtctaaatcatttgcgatctgaggaagaattccccccacaattaactcaaccaatccgactgcaatcgtagaagctgcaagcaggaaaactttgaaattcataacaaactcctttacttaaatgttttgataaataaaaaaaatcctgattacaaaaaatgtcataaacaaattttgtaatcaggattttacggttcctggtagacaccctcaaaccatattattgaggttatacaagtgttaatagctatttaattgattcgtttccgttgatgagtgtaccacattatgaatgaatcttccatagaaaatttacaaagtaatgaaccggacaagtgtatgattatatttattttataaaagtatagacatttaaaagtgaatgactataataatcaatgtaagcgttttaattacaaggggggatagcagttgaaaaaaatattactcgcgtgcagttcaggaatgtctaccagtttattggtgacaaaaatgaaggaatacgcacagtctatcggtgaggaagcagagatttgggctgttggccaagataaggcaaaagaagacatgagaaaagcggatgccgttttgatcggtccgcaaatgagctttctgaaaagcgagctccaaaaagaagcagatcaatacaacattcaagttgaagtcattgacatgatggcctacggaatggcagatgggaaaaaagcgtatgagcaggcattgtccttaatggtgaatcaataatggaacagatgaaaatcacgaatttaacagacgagcaaatcagttttcagctaatcctgcacagcggaaatgcccgaagctgcatcatacaatcactgcgcgcctataaagaagggaacaaggacgaggctgatgccctcattgccaaggcggagcaggatttatccgcggcccatgacattcactttcaaatgatacagaaggaatccggcggagaagcaacagctttttcattgctgcttatgcatgcagaggatcatctgatgtcaacattatccatgaaagaattagtgaaagagatgcttgatctctttaaaaccaagaatatataaaaaataggggtggatagggtgttcgagaaaatcagccaattccttgttccaattgcagggaggttaaacaataaccgctatttgcaagtgttgcgtgatgcatttatgctggctttcccgctgacgatattcgggtccatttttgtcgtgttaacgaatttgccgtttctaaacaaaatcatgaacgcctcaatgcttacgtcgtttcagtctcatttcggcattgcctccacggcgacaatgggcattatgtctgtctttgttgtgttcgggataggctattacctgtcgaaaagctatcaggtcgaagctgtatttggcggagcgatcgctttggtttcctttttgctcttaacgccatttatcattcagccggaaacaggtgatgccattacaggggttatcccggtcgatcgtctcggtgcaaaagggatgtttcttgggatgattacggcatttctttctggcgaaatttacagaagaatcgttcaaaaaaacctgacaatcaaaatgccagccggcgttccgcctgctgtagcaaaatcatttgccgcacttattccggcttttatcacattgaccgtatttttgctgattaacgtaatggtgactctgttttttaaaacaaatatgcacgacgtcatttatcacgcgattcaggctccgcttgtcggacttggaagcggtatcatcccaacgctgattgccgtgtttttcattcaaattctttggtttttcggactgcatggacagatcattatcaactccgtgatggacccgatttggaatacactgcaggtagaaaacctttctgcttacacggcgggaaaagaaatccctcatattatttcaaaaccgtttatggagatttatacagtagggatgggcggaaccgggatgacgcttgcggttgtgtttaccattctcatattcatgaaaagcaggcagatgaagcaagtatcaaaacttggcctcgctcccggtatttttaacgtaaacgaaccgattatcttcgggcttccgattgtcatgaatccgatcattattgtgccttgggtgctggcaccgatggttgttacgctcgtcacctatctggctatgtcagccgggctcgttccgcctccgactggtgtgacggtgccgtggacggttccattattcattaatggcatcatggcgacgaactcaatcatggggggcgtgatgcaacttatcaatctgctgattgtcttcgtgatctggtttccattcctaaaagcaatggataaattaaatctggcaaaagaaaaagaacaggctgtgcaggaaacagctgctcagcaaaatgataacagcataaaaatgtgacataaggggagagagacttggcacaaacagaacaatatcgttttccaaaggatttttggtggggatcatcggcttcagcaacacaaacggagggtgccgccgacagagacggaaaaggccagaatatatgggattattggtttgaaaaagaaccgcatcgtttttttgatcatgtcggacccgcagacacatcccaattttacgacaactataaagaagatatcaggctgatgaaggaacttggccacaactcgttccggatgtcgatttcctggtcgcgtttaataccaaacggaacgggcgagatcaacgataaagccgcaaatttctataacaatgtcattgatgagttgatcgctaacggaattgaaccttttgtcaatttgtttcatttcgatatgccgatggcgcttcaaaaaatcggcggctgggtcaacagagagacggttgacgcgtatgaaaactatgcaagaacttgcttccgtttgtttggcggcagagtgaaaaaatggttcacgcataatgaaccaatcgttcctgtagaaggcggatacctatatgattttcattatccaaacaaggtcgattttaaagaggccgtccaggttggatttcatacgatgctgtcaagtgcccgtgccattcaggcttacagggagatgaagcaggacggaaaaatcggcatcatcttaaatttgaccccttcatacccgagaagcagccatccggcggatgtgaaagccggggaaatcgcagacgcgttttttaacagatcttttttagatccatctgtcaaaggcgaatttcccaaagagctggttgacattttgaagcatgaaggctttatgcctgattacattcctgaagatcttgacatcatcaaaaagaacacggttgacctgttgggagtgaattattaccagccgagacgtgtgaaagcgaaagaacatcttccgaatcccgacgctccttttttgcctgacaggtattttgatccctacgtcatgccgggccgcaaaatgaatccgcatcgcggctgggagatctatgaaaaaggcgtttatgatattttgatcaatttaaaagaaaactacggaaacatcgagtgttttatctctgaaaacggcatgggggttgaaggtgaagagcgcttcagagatgaacaaggcatcattcatgatgattaccggattgaatttataaaagagcacctcaaatggattcaccgcgccatacaggaaggctcgaacgtaaaaggctatcacttatggacgttcatggacaactggtcttggacaaatgcctataaaaaccgctatgggtttgtatcagtcaatcttgagaaagacggagaaagaaccgtcaaaaagagcggaaaatggttcaaaacagttgctgagcatagcggtttctagattttcctaaaggtcaagatcttccggcaatcatcataacgaatagagatgacgaaaatccgcaacattgatgaaatagggaaaagaacttatgatatccgtaaaagcttatgtgatatcagactctaacagctgccggaggatgccaatgaataaatacgaaattattgcaaatgaaatgagaaatagaattaaaaataacgtatatccgatcgatcagcccattcctgatgaagtatctcttgcaaaagaatttaactcaagccgcatgacgatgaagagagccttggataatttagttgctgagggtctgctgttcagaaaacgaggccatggcacgtttattattcaatctgcaatacaggatgaccatgtacatgtagtcagcaatgagattctcggattgaccaacttgctgaaagataaaaaaatccaaagcaaggtcattcagtttgaagtgcaatttcccactgaggaagtggccgcccatttgtctattgatcaaaaaacaccggtttattatgtcgttcggcttcgaattgtagaaggtgaaccctatgtattagaaaaaacatatatgccgactcatttaataccgggcattaatgacgatgtacttcatgattcgatctacaatcatattacaaatgtgctgcagctcaaaatcgccggaacgcatcggaaaatcagagcctgcaaatctgatcatattgaccagcagcatctgggctgtaaacaggatgatccaattctggaagtggaacatgtgggcttcttagataccgggattccatttgaatattccttttcacgtcatcggcatgacaagtttgttgtgacttctgtaaacatacggcgctgattgcggagacaacaaggaggccatctgcatgcttggcggtattgaagcaggcggcacaaagtttgtttgtgctgtcggtagagaagatggaacgatcattgacaggatagaattctccacaaagatgccggatgaaacgatagagaaagtgattcaatattttcgccaattttcattacaggcaatcggcatcggctcctttggtcccgttgataacgataaaaccagtcaaacatacggtactattacggccacgccgaaagcgggctggagacactatccctttttgcaaaccgttaagaacgaaatgaagatcccagtcggatttagtacagatgtcaacgctgcggcgctgggtgaattccttttcggtgaagcgaagggtcttgacagctgcctgtatataacgattggcactggcatcggagcgggggctattgtagaggggaggctccttcaggggctgtcacacccagagatgggccatatttatatccggaggcacccggatgacgtataccaagggaagtgcccttatcatggagattgctttgaaggcttagcttcaggccccgctatcgaagcccgctggggaaaaaaagccgcggatttatcagatatagcccaagtctgggaactggaagggtactatattgcccaagcgctggctcagtatattttgatccttgcacctaaaaaaatcattcttggcggcggcgtcatgcaacagaaacaagtgttttcttatatctatcaatatgtaccaaaaatcatgaacagttacttggatttttctgaattatcagatgatataagtgattatattgtacctccacgtttaggcagtaacgccggaatcatcggcacgctagttttagcgcatcaggccttacaagcagaggtagcatccggggaggtgcgatcatgacgcatcctttatttttagagcctgtctttaaagaaagactatggggagggacgaagcttcgtgacgcttttggctacgcaataccctcacaaaaaacaggtgagtgctgggccgtttctgcacatgcccatggcccgtcggctgtaaaaaatggcccgctggcaggaaaaacactagatcaagtatggcaagatcatccagagatattcgggtttccggatggtaaggtgtttccgctgctggtaaagctgctggacgccaatatggatctctccgtgcaagtccatcctgatgatgattatgcaaaactgcacgaaaatggcgaccttggtaaaacggagtgttggtatatcattgattgcaaagatgacgccgaactaattttgggacatcatgcaagcacaaaggaagagttcaaacaacgaatagaaagcggtgattggaacgggctgctgaggcgaatcaaaatcaagcccggagatttcttttatgtgccaagcggtacactccatgctttatgtgagggaacccttgtccttgaaatccagcaaaattctgatacaacgtatcgcgtatacgattatgaccgctgtaatgaccagggccaaaaaagaactcttcatatagaaaaagccatggaagtcataacgataccgcatatcgataaagtgcatacaccggaagtaaaagaagttggtaacgctgagatcattgtttatgtgcaatcagattatttctcagtgtacaaatggaagattagcggccgagctgcttttccttcatatcaaacctatttgctggggagtgttctgagcggatcaggacgaatcataaataatggtattcagtatgaatgcaatgcaggctcacactttgtcttgcctgcgcattttggcgagttttcaatagaaggaacatgtgaattcatggtatctcatccttaatgaatgggggagttgcatttgtttaagaaacatacgatctctttgctcattatatttttacttgcgtctgctgttttagcaaaaccaattgaagcgcatactgtgtcgcctgtgaatcctaatgcccagcagacaacaaaaacagtgatgaactggcttgcgcacctgccgaaccgaacggaaaacagagtcctttccggagcgttcggaggttacagtcatgacacattttctatggctgaggctgatagaatccgaagcgccaccgggcaatcgcctgctatttatggctgcgattatgccagaggatggcttgaaacagcaaatattgaagattcaatagatgtaagctgcaacagcgatttaatgtcgtattggaaaaatggtggaatccctcaaatcagcttgcacctggcgaatcctgcttttcagtcagggcattttaaaacaccgattacaaacgatcagtataaaaaaatactagattcttcaacagcagaagggaagcggctgaatgccatgctcagcaaaattgctgacggacttcaagagctggagaaccaaggtgtgcctgttttgttcaggccgctgcatgaaatgaacggtgaatggttttggtggggacttacatcatataaccaaaaggataatgaaagaatctctctatataaacagctctacaagaaaatctatcattatatgaccgacacaagaggacttgatcatttgctttgggtttactctcccgacgccaaccgagattttaaaactgatttttacccgggcgcgtcttacgtggatattgtcggattagatgcgtattttcaagatgcctactcgatcaatggatatgatcagctaacagcgcttaataaaccatttgcttttacagaagtcggcccgcaaacagcaaacggcagcttcgattacagcctatttatcaatgcaataaaacaaagatatcctaaaaccatttactttctggcatggaatgatgaatggagcccagctgtaaacaagggggcttcagctttatatcatgacagctggacactcaataagggagaaatatggaatggcgattctttaacgccaatcgttgagtgaatccgtaatgtcacaattaagaaggtgctcaagaagtttcttgagcaccttcccactggattaagcattcatatcgcctaacccaggactgtgttcatttggtatttcaggaagcactggtacgggaaaccctgccggaggatctattacttgtaactctccgccatttcggcttggagatttcccttgatagatttcactgattctcgtttcatccaacctaaagttaaactgtgcattatgatagcctaattcgacatactttctgcactcaggatatttattaatgtcataattcggtacagggagcagcttcgcccattcaacgcccaatgtctcgagcgctttcgcgaatgcattctggtgagcattgtcgcgtacaatcagaaaagcaagtgtttcgcggaacgtctgattagagctcatttcataaattcttgttttttgcagcacacctgtcgactcaagaagcaggttatccagcaggtcagtaattaagtttccgtggttatacacccacgacccgttccacggattgccccctgcatcaacaggaagggaactttgcgctccaataatataatgatgaggattagcatgtttaaccgcttcatcaagtggcgcttgatctgcaccttgactgccgacaccttcaccgcctgattcatctaataaagcattgattgtgttttgaaccagttcaacgtgggcaatctcctctaaaaaaatgccgcgaagcagatcgcggtactgtttctgctttcctctgaaattagagctttggaaaaaaaactgcatcattgtacgcatttctccgtaatgaccgcctaatatctcctgcaggaccttagcagctgccgggtctggcttgtccggtttaatgatattaatcagttcctctttgtagtaatacataacacgcctcatttcttcttaagagattttcttatattatttgtaagatgagataaaatatatacatgataagcatgggaagacgtgaaagaagaaaataaaaaaatacatgaaaagtgttgaccaaatgaaacaagcatggtatattattaaacgtcgctgatgaacagcgtgaaacaaaacgaaaaacaaaaaagtttttctaaggtgtttacaagattttaaaaatgtgtataataagaaaagtcgaattgaaaaagattcgaaaaaacattttaaaaaaacttcttgacttcaccatcaaatgatagtatgatagttaagtcgcttgataagcgcccgtagctcaattggatagagcgtttgactacggatcaaaaggttaggggttcgactcctctcgggcgcgccatttaagataccacgcgggtgtagtttagtggtaaaacctcagccttccaagctgatgtcgtgagttcgattctcatcacccgctccattattgaatgatctttgaaaactaaacaagacaaaacgtacctgttaattcagtttttaaaaaatcgcacagcgatgtgcgtagtcagtcaaactactttatcggagagtttgatcctggctcaggacgaacgctggcggcgtgcctaatacatgcaagtcgagcggacagatgggagcttgctccctgatgttagcggcggacgggtgagtaacacgtgggtaacctgcctgtaagactgggataactccgggaaaccggggctaataccggatggttgtttgaaccgcatggttcaaacataaaaggtggcttcggctaccacttacagatggacccgcggcgcattagctagttggtgaggtaacggctcaccaaggcgacgatgcgtagccgacctgagagggtgatcggccacactgggactgagacacggcccagactcctacgggaggcagcagtagggaatcttccgcaatggacgaaagtctgacggagcaacgccgcgtgagtgatgaaggttttcggatcgtaaagctctgttgttagggaagaacaagtaccgttcgaatagggcggtaccttgacggtacctaaccagaaagccacggctaactacgtgccagcagccgcggtaatacgtaggtggcaagcgttgtccggaattattgggcgtaaagggctcgcaggcggtttcttaagtctgatgtgaaagcccccggctcaaccggggagggtcattggaaactggggaacttgagtgcagaagaggagagtggaattccacgtgtagcggtgaaatgcgtagagatgtggaggaacaccagtggcgaaggcgactctctggtctgtaactgacgctgaggagcgaaagcgtggggagcgaacaggattagataccctggtagtccacgccgtaaacgatgagtgctaagtgttagggggtttccgccccttagtgctgcagctaacgcattaagcactccgcctggggagtacggtcgcaagactgaaactcaaaggaattgacgggggcccgcacaagcggtggagcatgtggtttaattcgaagcaacgcgaagaaccttaccaggtcttgacatcctctgacaatcctagagataggacgtccccttcgggggcagagtgacaggtggtgcatggttgtcgtcagctcgtgtcgtgagatgttgggttaagtcccgcaacgagcgcaacccttgatcttagttgccagcattcagttgggcactctaaggtgactgccggtgacaaaccggaggaaggtggggatgacgtcaaatcatcatgccccttatgacctgggctacacacgtgctacaatggacagaacaaagggcagcgaaaccgcgaggttaagccaatcccacaaatctgttctcagttcggatcgcagtctgcaactcgactgcgtgaagctggaatcgctagtaatcgcggatcagcatgccgcggtgaatacgttcccgggccttgtacacaccgcccgtcacaccacgagagtttgtaacacccgaagtcggtgaggtaaccttttaggagccagccgccgaaggtgggacagatgattggggtgaagtcgtaacaaggtagccgtatcggaaggtgcggctggatcacctcctttctaaggatattatacggaatataagaccttgggtcttataaacagaacgttccctgtcttgtttagttttgaaggatcattccttcgaaacgtgttctttgaaaactagataacagtagacatcacattcaattagtaatacaagatatcacaagtgattctttttaacggttaagttagaaagggcgcacggtggatgccttggcactaggagccgatgaaggacgggacgaacaccgatatgcttcggggagctgtaagcaagctttgatccggagatttccgaatggggaaacccaccactcgtaatggagtggtatccatatctgaattcataggatatgagaaggcagacccggggaactgaaacatctaagtacccggaggaagagaaagcaaatgcgattccctgagtagcggcgagcgaaacgggattagcccaaaccaagaggcttgcctcttggggttgtaggacactctatacggagttacaaaagaacgaggtagatgaagaggtctggaaaggcccgccataggaggtaacagccctgtagtcaaaacttcgttctctcctgagtggatcctgagtacggcggaacacgtgaaattccgtcggaatccgggaggaccatctcccaaggctaaatactccctagtgaccgatagtgaaccagtaccgtgagggaaaggtgaaaagcaccccggaaggggagtgaaagagatcctgaaaccgtgtgcctacaagtagtcagagcccgttaacgggtgatggcgtgccttttgtagaatgaaccggcgagttacgatcccgtgcaaggttaagcagaagatgcggagccgcagcgaaagcgagtctgaatagggcgcatgagtacgtggtcgtagacccgaaaccaggtgatctacccatgtccagggtgaagttcaggtaacactgaatggaggcccgaacccacgcacgttgaaaagtgcggggatgaggtgtgggtaggggtgaaatgccaatcgaacctggagatagctggttctctccgaaatagctttagggctagcctcaaggtaagagtcttggaggtagagcactgattggactaggggcccctaccgggttaccgaattcagtcaaactccgaatgccaatgacttatccttgggagtcagactgcgagtgataagatccgtagtcgaaagggaaacagcccagaccgccagctaaggtcccaaagtatacgttaagtggaaaaggatgtggagttgcttagacaaccaggatgttggcttagaagcagccaccatttaaagagtgcgtaatagctcactggtcgagtgactctgcgccgaaaatgtaccggggctaaacgtatcaccgaagctgcggactgttcttcgaacagtggtaggagagcgttctaagggctgtgaagccagaccggaaggactggtggagcgcttagaagtgagaatgccggtatgagtagcgaaagaggggtgagaatcccctccaccgaatgcctaaggtttcctgaggaaggctcgtccgctcagggttagtcgggacctaagccgaggccgaaaggcgtaggcgatggacaacaggttgatattcctgtaccacctcctcaccatttgagcaatggggggacgcaggaggatagggtaagcgcggtattggatatccgcgtccaagcagttaggctgggaaataggcaaatccgtttcccataaggctgagctgtgatggcgagcgaaatatagtagcgaagttcctgattccacactgccaagaaaagcctctagcgaggtgagaggtgcccgtaccgcaaaccgacacaggtaggcgaggagagaatcctaaggtgatcgagagaactctcgttaaggaactcggcaaaatgaccccgtaacttcgggagaaggggtgctctgttagggtgcaagcccgagagagccgcagtgaataggcccaggcgactgtttagcaaaaacacaggtctctgcgaagccgtaaggcgaagtataggggctgacgcctgcccggtgctggaaggttaagaggagcgcttagcgtaagcgaaggtgcgaattgaagccccagtaaacggcggccgtaactataacggtcctaaggtagcgaaattccttgtcgggtaagttccgacccgcacgaaaggcgcaacgatctgggcactgtctcaacgagagactcggtgaaattatagtacctgtgaagatgcaggttacccgcgacaggacggaaagaccccgtggagctttactgcagcctgatattgaatgttggtacagcttgtacaggataggtaggagccttggaaaccggagcgccagcttcggtggaggcatcggtgggatactaccctggctgtattgaccttctaacccgccgcccttatcgggcggggagacagtgtcaggtgggcagtttgactggggcggtcgcctcctaaaaggtaacggaggcgcccaaaggttccctcagaatggttggaaatcattcgcagagtgtaaaggcacaagggagcttgactgcgagacctacaagtcgagcagggacgaaagtcgggcttagtgatccggtggttccgcatggaagggccatcgctcaacggataaaagctaccccggggataacaggcttatctcccccaagagtccacatcgacggggaggtttggcacctcgatgtcggctcatcgcatcctggggctgtagtcggtcccaagggttgggctgttcgcccattaaagcggtacgcgagctgggttcagaacgtcgtgagacagttcggtccctatccgtcgcgggcgcaggaaatttgagaggagctgtccttagtacgagaggaccgggatggacgcaccgctggtgtaccagttgttctgccaagggcatcgctgggtagctatgtgcggacgggataagtgctgaaagcatctaagcatgaagcccccctcaagatgagatttcccattccgcaaggaagtaagatccctgaaagatgatcaggttgataggtctgaggtggaagtgtggcgacacatggagctgacagatactaatcgatcgaggacttaaccatatttttgaatgatgttacatctgttatctagttttgagagaacactctcaatttgtttggtggcgatagcgaagaggtcacacccgttcccataccgaacacggaagttaagctcttcagcgccgatggtagtcgggggtttccccctgtgagagtaggacgccgccaagcattacttttatcatcgcggggtggagcagttcggtagctcgtcgggctcataacccgaaggtcgcaggttcaaatcctgcccccgcaaccaaatatatgattaaataaggagtgccctaagggtacaactaaaataatcttatacaaatatggtccggtagttcagttggttagaatgcctgcctgtcacgcaggaggtcgcgggttcgagtcccgtccggaccgccattaatgtaaacgaaacgatcatgttttcgttttttttgtgttttcttttactgtatcttctgcttggtgtcatagccaagctttctttatatcgggaacatcttggatattccagcaaaattcgataaactaggaagagcacatataggcataagcagggttgaaaggagattttggttcatggatgaatttgatttgatacatagcattactccgcggaccattcaccattcttccgttgatgtaggaataggtgatgatgcagcgctctacactgcgaaacacggcgttcaggaaattgtttgtgttgatactatggtagaagacgtgcacttcaaattacactattcctcacctgaagatatcgggtataaggcgttagccgttaatataagtgatattgccgcgatgggaggcattccgaaattttatttggtatcacttgcggtaccttcaaaatggacggcatccgaaatcaaggcgatgtatgaaggaatgaatgaactggcgaaactatatcagatggatctgattggcggcgatacagtttctaccgctgacaaattagtcgttacagtcactgtgatcggtgaaattgaaaagggacaggcctgtttgcgcagcttggcaaaaccggatgatattgtgtttgtaaccggtgaaatcggttcttctgcagcagggctttctttattgctggaagagactaatcctcaaaactcatctgtggaaacggattactttatccataggcataaacggcctgagccaagagtaagcgtcggcagattatgctcgtgttttaaacgggcagctttaaatgatgttagtgacggattggctagtgaactgaacgagattgcagaagccagctgtgtttcaattgaaattgatgaaagcatgcttccaattcattctgatttacctaagcttcatcctaactggaaagaatgggctttgtttggcggtgaggattttgagctgacagggacggtttcaaaagaggagtgggaagtgttgaagcagcagtgcgcagcacgtcaacttcccattacaaagattggccatgtcagggaaaaaacaaaatctaaagtgatcctaaaaacagatcaaacatcaatgatcttagagaaaaagggatataatcattttaaataagacgggtgactcgtgtgaagcaattaaaatggagaactgtaaatccagaagaaacaaaagcaattgccaagcttgcggcagcgtttgctaaaccgggagacgtcctgacattagagggcgatttaggtgcaggaaaaacgacttttacgaaaggttttgcagaagggctgggaattacacgtgttgtaaacagtccgacttttacaattataaaagaatataacgatggcgtacttcctctttatcacatggatgtgtatagaatggaagatgaaagtgaagatttgggacttgatgaatattttcacggacaaggtgtctgtctcgttgaatgggctcatttaattgaagaacagctgccgcaggagcgactgcaaattgtcatcaaaagagctggtgatgatgagcgggaaattacctttactgctgtcgggaatcggtatgaaatgctttgtgaggagttaagtagacatgacaatattagcaattgatacatcaaattatacattgggcattgcgctgcttcgagaagacactgttatagcagagtacattacatatttgaaaaagaaccactctgtaagagcgatgcctgctgttcattcattgctgaatgattgtgatatggcaccgcaggacctttctaaaattgttgttgcaaaaggccctggttcttacacaggagtaagaataggtgtgacgttggccaaaacacttgcctggtctttagacattccaataagtgctgtatcaagtcttgagacgcttgcggcaaatggtcggcattttgacggtctgatcagcccaatctttgatgctagacggggacaggtgtacacaggtctgtatcaatataaaaatgggcttttagagcaagttgttccagatcaaaatgtgatgctggcagattggctggagatgctaaaagaaaaggaccgccctgttttgtttttaggccatgatacttctcttcacaagcagatgatcgaggatgtgcttggaacaaaagggttcattggaactgccgcccagcataacccgcgtccttcagaattggcttttctcgggaaggaaaaggaagcagctgatgttcatgggcttgtcccggattacttgcggctggcagaagctgaagcgaaatggattgaaagtcaaaagtagggtgataggatgaaaacaaaagcagcggtcagaaatatgcggcttgaagatatagatcaagtatacgaaatcgaagcatcctcctttacgtctccttggacgaaggattcgttttatcatgagctgctggaaaatccatatgctcattatctcgtgattgaaaaggacggccatcttgctgggtattgcgggatttggattgtgatggacgatgcccaaattacaaatatagcgataaaaccagagtatcgcggccagtctttaggagaaacgctttttcgctcagctgttgaactgtgcaaagaaaaagacgcaaggcggctttcgcttgaagtgagggtttcgaatcatcctgctcaaggcttatataagaaattcgggatgcagcccggcggaataagaaagaactattatactgataacggggaagatgcgttaattatgtgggtgacgataaatgagtgagcaaaaagacatgtacgtattaggaattgaaacaagctgtgatgagactgctgcagctattgtgaaaaacgggaaagagatcatttcaaacgtagtagcctctcaaattgaaagccataagcgcttcggaggcgttgttccggaaattgcttcaagacatcatgttgaacaaatcactttggttatagaagaggcgtttcgcaaagctggcatgacgtatagtgatattgatgcgattgcagtaacagaaggtccgggactggtgggagcgcttcttatcggagtgaatgccgctaaagcattgagctttgcacataacattccgttagtaggcgttcatcatatagccggtcatatatacgcgaaccgtcttgtagaagacatcgtgttcccggcactggcattggtcgtttcaggaggccatacagaactggtttatatgaaggaacatggatcatttgaagtcattggggaaacccttgatgatgcggcaggagaagcctacgacaaagtggcgcggacgatgggattgccatatccgggtggaccgcaaattgacaagctagctgaaaaagggaatgacaatattccgcttcctcgcgcatggcttgaagaaggctcttacaacttcagctttagcggattgaagtctgcggtgatcaatacgcttcataatgcatcccaaaaagggcaagagattgctccggaagatttgtctgccagtttccaaaatagtgtgatcgatgtcttggtaaccaaaacggcgcgcgcggcaaaggaatatgatgtcaaacaggtacttttagccggaggagtagctgcaaacagaggcctcagagctgcattagaaaaggaatttgcccagcatgaagggattacgcttgtcattcctccattagctttatgcacggataatgctgcgatgattgctgctgctggtacaattgcttttgaaaaaggaattcgcggtgcatatgatatgaatggccagcccggccttgaattgacttcttatcaaagtctcacgagataatagcgtgagactttttatctgtttgttattaacagataattcacaatttatccacatgtctgtgagtaattatagagatatagatggataaagggctgaagtcactgttaataaagtggataaattcagaatattttgtggatattgtgtataaagcgcttactttgttttgcttattagggtatgttctgtggataaaaagcacctctaaaaagaggtgcttgacttttttaatcttcttctgtggatagttcttcccattcggacaaaagagattccagctcctgattaagcttctcattgtctgcatggatagcttgtactttttcatgatcctgatagacttcagggtcacatagcaattcatcattgcggctgatgttctcttcaatggtttgaacagtggtttcaatttcttcaatccgacggagtcgttggcgctctttctttttccattctttttcttcctcgtaggaacgtttggagtcagacttcacagtagctggcgttttttcagtttcttcttgctgatttattttctccaattcaaactgctctgtttttttctcagtataataatcgtaatctcccagatactcctctatatggcttgaagaaagctccaatactcttgtggcgattctgttaataaaatatctgtcatgtgagacaaataacagtgtgcctggataatcaatcagcgcgttttcgagaacttctttgctgtctaaatccagatggttcgtcggttcatcaaggatgagaaagttggctttttgaagcatcagcttagctagagccaatcttgctttttcgcctccgctcagtgaatgaactggtttcagcacatcatctccggagaataagaaatttccgagacacgttctgatttctttttctgggagcccggggtactcgtcccacagctcatcaaggacacgtttagaggaagtcagctcagcctgttcctgatcataatagccgacactgacatttgagccgtatgagatcgttccttgatctggttttagggtgtctatcaatgttttcagtaatgtcgatttaccaattccgttagggccgacaagcgctgcgctttctcctcttgtgagcatgaatgacacttctgttaaaagcggcggctggttttcatagctgattgtgagatcctgaacacgaaggacttcatttccgctctgttttgtaatatcaaaatgaaagtttgcggatttttcatcgccaagcggttttgacatgacttccattcgctcaagctgctttctgcggctttgcgcccttttggtggtagaggctctcgccaggtttcggtctacgaagtcctgcagctttgtaatctcgccctgctgcttttcatacattttaagatctttttcatactgcgcggctttttggtcgagataagcgctgtagttgccgtgatactttttgctttctgctcttgatacctcgtatacctggtttactactttgtccaaaaagtagcggtcatgcgaaacgatgagaatggcgcctgaatagccttgcaaataatgctcaagccaggtaagcgtatcaatatccagatggtttgtcggctcatcgagaatgagcaaatcaggctgtgttaacagaagcttacctaaagccagtcttgttttctggcctccgctgaggctttgaacctgtgtagaatcgtcaaaatggctgaagccgagaccatgcagcacagatctaacatccgcttcatattgatagccgcctttatctttgaattcctgctgaaggcggtcgtaggttttcatgatgctttctaattcaccggggtcagctgccgccattttttcttccatagcccgcatttccttttccattgcttttaagtggtcaaaaacagtcagcagctcttcttttatggtaagcttagaatccaagccagtatgctgagcgagatatcccattgtaatatctttcggtttaataatttcgcccttttcatacgaaagctggcctgcgataattttaaggagcgtagattttccggcgccatttcttccaacaatggcgatgcgatcacgatttctgacttccagctttatattgtttaaaatagtatcagcaccaaacgatttggacagctgattaacttgtaagatcatcatattatttcacctctgctataataagttaagtgtagcttatgaaccagaagtcagcaaacaatacattggccatataagacatagagaagaaaatagtgtatgatctgtttaaggagcgttttaatatgaatggattttctcattttaatgaacagggcagagcccagatggtggatatcagcgaaaaatcttcgactgtccgtactgcggcggctgtttcaagcgtacacatgaagaatgaagtgtacgagaaaatacagagtcacgatatcggcaaaggagatgtactggctgtcgcacaggtggcaggcattatggccgcaaagcaaacgtcgaatatcattccgatgtgccatccgctttcattgagcgggatagatatatcgtttgactggaaaataaaagaagcagaagttatacttcatataaaagcacaggtcaaaacaaaagggagtacaggtgtggaaatggaagcgctcacttctgcatcggtgtgcgctcttaccgtttacgatatgtgcaaggctcttgataaggggatggtcatcggccctactttcttgctggagaagacaggcgggaaaaacggtgactttaaaagagaactatccgagtataatttggaggaccaaaaatgaataaggatcaatcaaaaattccgcaggcgacggcgaaacggctgccgctttactatcgctttttaaagaatctgcatgcgtcaggaaaacagcgtgtatcatccgctgaactcagtgatgccgtaaaggttgattctgccacgattcggagggatttttcctattttggagctcttggcaaaaaaggatacggatataatgtggattatttgctgtcttttttccgaaaaacgcttgatcaggatgagatgacagacgtcatcttgattggtgtcgggaacttgggaacggcatttcttcactataatttcacaaaaaataataacacaaaaatttctatggcttttgatataaatgagagtaaaataggaactgaggtaggcggcgtgcccgtctataaccttgatgaccttgaacaacacgtaaaagatgaatcagttgccattcttacagtgccagcagttgccgctcaatccattacagacagattggtcgcattaggaatcaagggaatccttaattttacgccggcccgtttgaatgtgccggaacacattcgaattcatcatatagatttagcagttgagcttcagtcactggtttattttttgaagcattattcagttttagaggaaatcgaatagagggaaaggaggagcccaaatatgccgatcggtcctggaagccttgctgttatcgcaatcgttgctctgattatcttcggtcccaaaaagctgcctgaattggggaaagcagcgggagacacacttcgtgaattcaaaaacgctactaaaggattaacgagtgatgaagaggaaaaaaagaaagaagatcagtaagttaggatgacacgaatgaaagtgaatcaaatgtcgctgctggagcatattgctgagcttcgaaaacggttgctgattgtagcgctggcgtttgtcgttttctttatagctggattttttttagcgaagccgattattgtgtatctgcaagaaacagatgaagcgaagcagcttacgcttaacgcgtttaacctgacagacccgctttatgtgtttatgcagtttgcgtttatcatcggcatagtcctgacctcgccggttattctttatcagctttgggcttttgtgagcccgggtctctatgagaaagagcgcaaagtaacgctcagctacattccgatctctattttgctgtttttagcgggcttatctttttcatattatattttatttccttttgttgttgattttatgaagcggatctctcaggacttgaatgtcaatcaggtgatcggaattaatgaatattttcattttcttctgcagctgacgattccgtttggactgctgttccaaatgccggtcatcctcatgtttttgaccaggctcggaattgtgacaccgatgttcttggcgaaaatcagaaagtatgcgtattttacgctcctggtgatcgcagccctgattacaccgcctgagcttctgtcccatatgatggtcacagtcccgcttttgattttatatgaaatcagtattctgatatcgaaggccgcctatcggaaagcgcagaaaagcagtgcagccgatcaggacgtgtcttcggggcaataataaaaaatccatttctcatgagagaaatggattttctttatttttggttctttttgattttaaatgaaaaggcgaacatcttaaaagaaatgctgatgttgtaagcggcgaacaccatcagcaggatggagtaaaatgaccacatgctgcctggcgagcttgcggcaagataagtaaagatgcaccctacggcaaagtagatcattccccaaactaccgggtttctcataaaaataatcctccaataatcaattgcatttgtgtgctctgctgttcaaggtaattccgaacaggctcaagctgcatgatgacgacgaatgtattcatcattaaatgggcgaaaatcggcacccatatccgttttgttctcgcatataaaaaggcaaaggtaaagcccattgctgtatatagaagaagatgcttcaaatcagcgtgaacaataccgaagataaccgagctgatcagtcctgcaaaaaagaaattcgttttttcgtacagcgcgccgaaaatgatttttctgaagatgatttcttctaatataggcccgacgatggaagaaacgataatcatgagcgggactgcctgaatgacatccagaatcgcttgtgtattttctgattctcttccgatgccaaaaacataatattcaatagagcctgctattccttgagagaaaagggcaatgaaaaaaccggctatcgcccaaaggatagaaagtccgattgagtccttctgtccgtttcgcagcgtttctttcggaacggttctcagaatgagcagaacaacaacgagacaggcgataaagctgataacggaccataatccttgtgcatgcagcatattttcatctgtaggctgtcctccggcataaccgaatttaaataacaagggaatcgcgattaatgcggaaaactgcatgatgatatatgtcaaaataataaaccaatactgttttctcaaatggtatgtactcctttgttaagtgggtttcgttcatctacagctattgtaacataatcggtacgggggtgaaaaagctaacggaaaagcgagcggaaaagaatgatgtaagcgtgaaaaaatttttatcttatcacttgaaattggaagggagattctttattataagaattgtgttagcactctttagtgctgagtgctaaaattacatattcatactattgaggaggttattacattgttaaagccattaggtgatcgcgttgtcattgaactcgtagaatctgaagaaaaaactgccagcggaattgtgttgccggattctgcaaaagaaaaaccgcaagaaggcaaaatcgtggcagctggttcaggtcgcgtgttagaaagcggagagcgcgttgctttagaagtaaaagagggcgaccgcattatcttctcaaaatacgcaggtactgaagtgaaatacgaaggtactgaatacttaatcttacgtgaaagcgacattttagctgttattggctaattcttaaataaacaatatttaaaacatttgaggaggtcttgtaaacatggcaaaagaaattaagtttagtgaagaagctcgccgcgcaatgcttcgcggtgtcgatgcacttgctgatgctgttaaagtaactttaggaccaaaaggacgcaacgtggttctagagaaaaaattcggttctccgttaatcacaaatgacggtgtaacaatcgctaaagaaatcgagctagaagacgcgtttgaaaacatgggtgctaagcttgttgctgaagtagccagcaaaacaaacgacgttgccggtgacggtacaacaactgcaacagttcttgcgcaagcaatgatccgtgaaggccttaaaaacgtaacagcaggcgctaaccctgtaggcgtgcgtaaagggatggaacaagctgtagcggttgcgatcgaaaacttaaaagaaatttctaagccaatcgaaggcaaagagtctatcgctcaggttgctgcgatctctgctgctgatgaggaagtcggaagccttatcgctgaagcaatggagcgcgtaggaaacgacggcgttatcacaatcgaagagtctaaaggcttcacaactgagcttgaagttgttgaaggtatgcaattcgaccgcggatatgcgtctccttacatggtaactgactctgataagatggaagcggttcttgacaatccttacatcttaatcacagacaaaaaaatcacaaacattcaagaaatccttcctgtgcttgagcaggttgttcagcaaggcaaaccattgcttctgatcgctgaggatgttgaaggcgaagcacttgcaacacttgttgtgaacaaacttcgcggcacattcaacgcagttgctgttaaagctcctggcttcggtgaccgccgtaaagcaatgcttgaagacatcgctgtccttactggcggagaagtcatcacagaagatcttggccttgacctgaaatctactcaaatcgctcaattgggacgcgcttctaaagttgtcgttactaaagaaaacacaacaatcgttgaaggcgctggcgaaacagacaaaatttctgcccgcgtgactcaaatccgcgctcaagtggaagaaacaacttctgaattcgacagagaaaaattacaagagcgtcttgctaaacttgctggcggcgtagctgtcatcaaagtcggcgctgcgactgaaactgagctgaaagagcgtaaacttcgcatcgaagacgccctgaactcaactcgcgcagctgttgaagaaggcatcgtatccggtggtggtacagcgcttgtaaacgtatataataaagtcgctgcagttgaagctgaaggcgatgctcaaacaggtatcaacatcgtgcttcgcgcgcttgaagagccaatccgtcaaatcgcacacaatgctggtcttgaaggatctgtcatcgttgaacgcctcaaaaacgaagaaatcggcgtaggcttcaacgctgcaactggcgaatgggtaaacatgatcgaaaaaggtatcgttgacccaacgaaagttacacgctcagctcttcaaaacgctgcgtctgtagctgcaatgttcttaacaactgaagccgttgtcgctgacaagccagaagaaaacgctggcggcggaatgcctgatatgggcggcatgggcggtatgggtggtatgatgtaataccgacaaaaaacccttgatttacaaggggttgtcggcaacggacgtcatttttgatgccctttataacttttcgaggcttctcatgagttcactgaacttgtgagaagcttctttttttctgtctttcgtagtttgattttttcagcactgttctatatcgattttcaatagttttgataatcccgatatgaactattcaattgaccaaaatacaaaattctaccggctcagattcctgtttacgtcttctttgataaacggcttactgtaacttcagtaaactgcatttctgttatgattataaaaagggtttaaaaatttttcgtccaaacctctgttacttctctccctattgcagacaggagatggtatcctctcatacagacaaaaaagccccagttttctaaataaatagtgtcaccaacactcttagaagtttccctaaggagtacattgccaaagagaaatcctattaaaatgtctatttgtgctgctttttagctactaagacgatgtatgttaaagatatagaacggcagaataatctgattctcaaaaattcactgtcggtgtagttaggttcttccaccaacatcttgataatattcatcccgactctatggagaccgacattccaattattaaatctaatattagttttttatgattaccaaggaggacttaatagtgcatttttcagaaatgatagatcgcttggctttatatgatttacacagaaaaagaagcaaagataaacatttttctgctgctattgcagccgatatcgatgatagagaggaattttacagtgcgaatatagctgatgtttcaattgatttgaatgaatctaaaaaaaagtatagggttggaacatttcgttatgaatccttaattcaaactgggaatcctgttaatgatactttaaaaggggaggtttttttacataaaaatgatatagatcaacccaatgttatctttgtacacggctggcgcatggaatcgtacaataggatcaaaagaatatttcataagcgtataatgaatgatttaggctggaacatgtattattattctcttccataccattttgaaagagaaccggaaaattcactgtatagtggcgagttgatgattagtgcgaatattgatcgtacaattgagtcgacaagacaggccattgtagatttacgggcattaattcactggataaaagcaaataaaaaaggccctgttatcatagtgggggtaagtttagggggatggatcactaatctaattgctaccctagaatctcaaattgatgtagtggtatcaatcttttatgccaatcgcctttcttattcaatatggaacacgatcccaggtaaattcataagagaagaattagaacaaaatggtgtgacctatgaagatttaacaaaatattggaatatcacagatcctagtcaagccttgccgaaagttaataaagataacattctgctgatttctgctaaacatgatcagtatattgacttaaaagatgcagattatttatgggaaagttgggagaaaccgaaaagatatgtctataattgcggtcattccggcattgttctttgtcgcaaaaagctggcaaatgatacgatttcctttataagagaaaggataaatacgggaaaacctggttcagtacatttgtagaccttaataagaaacaaaaggccaactgcaacttcagttggccttttctatttataataaagaaactgggtgagattgctgtcagaactactatgcgtactagtcgttttctttaatcaccattgccagttcttccacctcaccccgaatcccaatcgcaggctcccacgaatcaatcaaacgaatcgctctctgattagcttccatcgctttcgttttctctcctttacggttcaacagctgcgccatcccgtaaaaataatagatcaactcaacctgattggcgttatgtttgtcatagagcatttgctcaaaggcttcttccgctttctcaaattgaccacatttcacgtaagcgacacccagattgaaataggcttctatcgttttttcgccgccgtacgtggagctgatttcatttgccgcttcgtataattgaatggcttcttcatgatgacctctcgcaaagcttaagtcaccgcgaaccaaaagaactctgtgttgaatggtaggagaaattggttgatcttcgatttcgtttaaaatggtctctgctttttcctgttgcccgtcttttaaaaacagccttgctttgagtgcatgtccccaaacctttagatcataggcatcgtgagcatctgattgttcaagaatcttcagcccggcttctatttgctgtaaggccctgtctaaatcattgacttccatcagagcccagcctgctgtgtcgattcggaagtacgcttctcgtgtgtgttggcctaagtgatgggcggcgtcggccgctttgcgtccgtattcgattcgcaggggcaggttgattctgcttagaaaatggctaatgcgggtgatgagttcgattaggatttctttttgttcagtttcacttgcccattggatgacctttaagatgtttggccattcttttttcatttgatctaagttccgtcccagcaggtagctccaatagatagagttgggctgttcccgctttaaatgggtttcggcataatcaacataatagtgcgcccagcgattgcgggcttctttttcatattcgtgctgttcggacaagtgctgttctccgtaagcgacaacggtttggtgcgctaagtattgtgtccttccttcgcttcgttccggctgaatcagagcgtatgaccgcatttgttccatagcgtaatgaaaacggcgggcgtctaatccggctgctgccgccaggcttttttcatcaggcggcttgctgaaaaagcaaagcgtctgccagagctttcgtgtatcttcattgcatctgtcccaggtgcggccaaagaggaattcaaacaattccagcagtgagtagcctgcttttccaagctcatgaatcaactgctgcgcggggatgtcatcgtctgacatataggcgatgctgagtgccatggctttcgggtttccagcagtcgctgaaatgaattcgtttttcagatcagatgatagatgtaacagctgctccagcttttcccgcttatgtgggaggttgcatgtttgtaagcagcggtgcacttcttgctggaaaaatttcaaggcatctgtttggttaaggccgctcagctgaatagctgtcatttctccgaagctttcccgataagtttgctttacgttttcccgcgctgtgaggagaactttcacgccttgcggaaggctggtgataaattcatgaatgtcacgttctgcagtatcaatgctgtcaacgatcagcaggatcggtttttctctagtgtaattagctaacgcattgcggacgacgaatcgtttttcattgattgatttatcgatttgttctgtacgtccgagctgataggcgatcgtatttaaaaaatcgctaaagctcaatcctttccaatcagcgctgacccaaatgatactgttgaacgccggccaatctgaagtatcgtcgacacaggaataggctgcttcaagagcgattgtggttttacccataccagcccagccggtgattaaacagactggtgacggagaaagcatccattgccgtatcgcttccatatcaaagctgcgtccgataaagcgtccggaccagcgtgagggtaaattatgagtgataggctgttctgtaagcgcattcgtttcatggccgggtctgtcatgaaacagccgttttactacattttcaatttcgtcttcactcggagccccgaataatccgtcttttcgcagtattttcgcttttttcaaacaggatgctgcccatacaggcaatgcgggtttgatgactgggatagtggtggcttccagcaagtcggtcaaccactcgatatccaagtcggtcttttcgagaatgatccagatcattccgaacagttttccgtcgtcgattcttccgggaatgtagtttgctcccatctgtccgatccagcttttgatcgtgtttggggagactcccagctggagtgcgattttatctatgtaagactgtcctgttttttcattctttttccttctgattttataatcaggatgaagttttagcgttttgacgccaggtgccagcagttgtgcaaattgttttcggttttcaagttcagccataagcctgcacctcctattagtactattttatcaatccagcgttttttgtatatgaaaaaataaaagtacagtgccgctgtccttttatacagcaggaaaggctgttgaacgtgttgaaaagcagataaaatgggggcagtaacagagaaaacaaaaatgtatgcacttacattttattttctaaagaaaggaacttgccaaatgactcacacagtacctcaaaacatgaaagcggctgttatgcacaacacaagagagatcaaaattgaaacattgcctgtgcctgatatcaatcatgatgaagtgttgattaaggtgatggctgtcggaatttgcggatctgatctgcattactatacaaatggccgaataggcaactatgttgtggaaaaaccatttatccttgggcatgaatgtgcgggtgaaattgccgctgtcggatcatctgtcgatcaattcaaggtgggagaccgcgtcgctgtagagccgggtgttacgtgcggacgctgtgaagcgtgcaaagaagggcgctataatctttgcccggatgtacagtttttggctacaccgccggtagacggcgcgtttgtccaatatattaaaatgcgtcaggactttgttttctctatcccagactcactttcttatgaagatgctgctttgatcgagccgttttctgtcggcatccatgcggcggccagaacgaagctacagcccggatcaacgattgcgattatggggatgggccctgttgggttaatggctgttgccgcagctaaagcatttggggcaggcacaatcattgtcaccgacttagagccgctgcggttagaagctgcgaaaaaaatgggagcgactcatattattaatatacgtgaacaggatgcacttgaagagattaaaacgatcacgaatgatagaggcgttgatgttgcttgggaaacagcagggaatccagcggcattgcaatccgcactggcttctgtgcgccggggcggaaaattggcgattgtcggtttgccttcacagaacgagattccgctcaacgtgccgtttattgcggataatgagattgatatttacgggatcttccgttatgccaatacgtatccaaagggaatcgaatttctcgcttccggcattgtggacacgaagcatctagtaacggaccaatattctctggagcagacacaagaggcgatggaacgggcgcttcaatttaagaatgaatgtttaaaagtgatggtgtatccaaatcgctgagtgaacagggaggatcttcgtattctccctcttgtttactggaaatgaaaacggattcttggggtgggaaatgatgattgaaacagaaaaagtaacggcaatgaaagtgaagcatcagtcaaaatccagtaccggactgtcctggtttgaacgaatcggttatggattcggtgatatgtcgtataatattatctttcagtttgtaaacgcatacttattattttattatacagacgtcggcggcattcagcctgcggtgatcgcaactttgtttcttgttgtgcgtgtgctggatgctatttttgacccgatcatgggattgattttagataaaacgaatacaaggtggggaaaagcaaggccatatttgctgtgggtggcatttccttttgcgctattcacattcttatgtttcacgacgtctcatttcggtgagaccggaaatatggtatatgcgtatgtcacttatattctgcttgggatgtcctttagtatgcaaacgatcccggtgaacagcttaacggggcggatgacgaattcggtggaggaacgaacggttctgaccacaacccggatgattttggtgtatatcggcattcttttatccatttcctgtgcgacaccgcttgcaactgctatcggaggagaggatcaggcgtttggatttcaaatgacggcgctcatctatgcggctgtcagcatcgttttgaatctatttagtttcttttctgtacgggagcgaattcagcctaaaaagagaaaaaaacaagggatcaaaaagacattatccgttttattccgaaacaaacccttgcttatgttaatttcatcatttttggcttttgcgatcgggtttaatattaaactcagcacgatggtgtattattttacgtataacgtcaaccataaagagttcgtatttatgggcaccgttttatttttcggagcagcgctgatcagcaatttgtttattcctttcttttctgagaagtggggcagaaaacaagtcatgatcatcacggcagctctatcgcttatttcttatgccggcctgcattttacgccgtattcttccattacactcattttcatttggcttttcgtttcgggatttttcacaacgcctttaaatacgcttgcttggggaatggtggctgattgcgtcgattatgcggaatggaaaaccggagttcgcgcggatggtgttgtgatttcgagcatgagctttattaataagctgggtgttgcgttagccgggtcattttcggccatttacttaggaatcgccgggtatgtggcgaatacagaccagacagttgcgtcattgaatgcgattaaaaatatgaatgctttgattccgggatttttcattttgctttctattattcttatcgccttctatcctttaacggaaaaaagatataaacacatcatctctgagctggagcaaaggtctgcgagataaatagatgtaaaatttttaatattcaatgttgtatttatggcagaaagtaatatactgagactgtaatctagactttataaatgagtgtgataatatgcgtagtcattctgtagtttgtattggggaattgttgatcgatttcttttgtaccgatgttgacgttgatttaatggaagggcgccaattcctgaaaagtgccggcggggcaccggcgaatgtgtcggcagcaattgccaagctgggaggagacgccgctttcagcggaaaagtaggaaaggatccgtttgggtattttctgaagcaaacattggacgctgtacacgtcgatacctctatgctggtgatggatgagaaagcgcctacaacgcttgcttttgtttcattaaaacaaaatggagagcgtgactttgtttttaacagaggcgcggacgctttgtttacgctggaggatattgaccatgaaaaactaaacgaagcgaaaatccttcatttcggctctgcaacggcactgctatcagatccgttttgctcagcctatttacggctgatgtcgagtgcggaagacaatggacagtttatttcgtttgaccctaactaccgtgaagatttatggaggggaagagtctcagagtttgtaagtgttgcgaaaaaagcgatcgctgtaagtgattttgtgaaagtcagtgacgaggagcttgagattataagcggtgtgaaggatcatgaaaagggagttgcgatccttcatgagatcggagccaacattgtcgctgtgacacttgggaaaagcggaacgcttctttccaatggaaaagaccgtgaaatcattccaagcattccggtgacatcaattgactcaacaggggcgggagatgcttttgtcggtgcggctttatatcaattggcaaacacggatcagattcaatctgtagatgctaattttgtgaaactgcgtgagattgtgtcgtttgccaataaggtcggagctcttgtgtgcactaaaattggagcgattgatgcactgccgagcttggatgagattgaagtttctttgtaaacattgaagatgtttcttgaaagtctttggacttttggaggcatctttttttattgcttacatttttgttcgggtaaaaagttgtgtattttttgtttgaaatgtcattttttattaaaaaagtgaaacttttaacgataataaatagtatatgtaacaagggttaccgaatttgctttaggaggaacgatataatgagtataattggaagatttaaagatattatgtctgcgaatatcaatgctttattggacaaggctgaaaatccggagaaaatggtagatcaatatttaagaaatatgaatagcgatttggctaaggttaaggcagaaacagcagctgttatggccgaggagcagagagcaaaaagagaatatcacgagtgccaggcggatatggaaaagatggaaagctatgcaatgaaggcgctgcaagccgggaatgagagcgatgcgagaaaatttcttgaaagaaaaacatctttggagtcaaagctttctgagctgcaggcggcgaatcaaattgctgcaaccaatgccgcacagatgagaaagatgcatgacaaattggtatctgacattggagagctggaagcacgtaaaaatatgatcaaggcgaagtgggcagtagcgaaaacgcaagaaagaatgaacaaactgggcgcttctgtttcaagtacaagccaatcaatgtctgcattcggccgaatggaggacaaagtaaataaggcacttgatcaggccaatgcaatggctgaactgaacagcgctccgcaggatgatatggctgatctgactgcaaagtatgacactggcggttcaagccaggttgatgatgaacttgcggcgttaaaagcgaaaatgatgctcgataagtaatacataggaggccgcagctctcggctgcggcgtcattttatcataagatgtgagagggaacggtaatgataatatcttataagtgtccgaactgcggcagtgatatggcatttgacagtgaaaccggctcgttatcctgcagcagctgcggaagacaggacaatattgaaagccttccgaaagaaaacattgcggcacggttttctgatgatgaagcaaaagaatatcaatgtgaaaactgcggtgccgttttgatcacggaagctgaaacgacagcaacgacgtgcagcttctgcgggggtgctgcaatacttgccgatcgattatcaggtcatttggcaccggcgaaagtcatcccatttacaatcagcaagcaagaagccgagcaggcatttcgaaagtggtgcaaaaaaggccttctgacaccaagaggtttcatgtctgccgatcgcattaaaagcatcaccggcatgtatattccgttttggatgtttgatttaaatagtgaagtacaggtgagagcaaactgtaccagggtccaccggtatgaagaaggggattatatttgcacggaaacagagcactttgaagcatttcgtgatatcaatctcgattatttgaaaatccctgtcgatgcctctgaaaaaatgaaagacgaattaatggacaaattggagccttattcatacgaagagctgaaggactttcaaacggcatatttggccggttatattgcggaaaagtacaattataccgatgaggagctttttccgagagcaaaagagaaaatcagcagttatatagattcatacatccattctactttttccggatatacgtcagtcaatgtgagggacaaacatattcacacgaaaaacgtgaacagcttttacgttttgcttcccgtttggatggtcagttacgattatgaaagagcagagcatatctttgcgatgaacgggcaaacaggaaaggttgtcggaaagccgccgatcagtcgaggaaaagtggcggcatggtttagcggaatagcaggcgggacatttcttgcgttgaagctcgtctcattgatgatgggaggcggattttgatgcgtggattttttggaaaagcgatctttgttgtgctggctgttttcatcatgatgcctttactggggatcgaagcggcaagagcttctgaatcacagcagcatgtgtacgatcgcgctcatctattgtcaaaagcggagatcggaaaacttgaatctctctcggcagagctgggtgcaaagagggacactgatttcatcattattacgaccaaaagcacaaacggtgaagatattgcagactataccggcgatttttatgatcgttacggaaaaggcagtacagctattttaacgattgatatggcggatagagaagtattcatctcgggctacgaaaaagctgaaaagtatttggacaacagcaggctcaatagcatcagaaatacgatttcatctgatttatccaatgaaaattattttgaagcttttgagacatatattcagctttcctataaagatatgggcataaaaccgggagtaaaccccgacaacatattctttacatggtggtttcagctgattgctgccatcgcagtcgggggaattgcggtttcaatcatgctttatcatgcaggcggcaaagtaacggttaatggaaatacatatatggatcagcgtacgtctgatgtgattgatcaatacgacacttatattagaacgactgtaacaagagaaagaaaaccatcagataaagacagcggcagcgatggcggtgttacgaaaggcggcacgtcatacagtgggagccgaggcagtttctagtagaagaaaatagagaaagggagaggcgtaatgtcgtttttcagaaatcaattagcgaatgtagtagagtgggaagaatttagagatgatatgattttttataaatggaacaatcgtgaaatcaaaaaagggagccgtttaatcattcgtcccggacaggatgctgtctttttgaacaatgggcgggttgaaggagtctttcaagatgatggcgattatgatattgaatcagaaattattccattcctttcaacgttaaagggctttaagtttggctttaacagcggcatgcgagctgaggtgctgtttgtcaatacgaaggaatttaccgtaagatggggaacaaaacaggcgataaatattccggcagcgggaatgccaggcgggatacccattcgcgcaaacggcacatttaattttaaggtgcaggactatatcagcctgattgataaaatcgctggcgtgaaagatcaatattttgtagaggatattaaaacccgtatcatttctattctggatcagcttctcatgaagtggatcacaagagaagggaaagatatgtttaatcttcaagcaaacgcttttgatattgccaagggaattcaagaggacttggatatgcaattaataagcgacgggatgacggtcactggttttcaaatcatgagctttaattatcctcaagaggttcaagatatgattacaaagaacgcttcctatggtatggttggggatgtgaacagataccagcaaatatcaatgacggatggaatggcatccggaaagatgagcggaggcggagcggcttcggatatggctggaatgatgatgggaatgaatatggccaatcagatgatgaaccaaatgaatcaaaatcagcaggcacagtcatcaggcccacagtcaactggcagcggaagcaaaccgaatttctgtccaaactgcggaacaaaaacgggcgaagccaatttttgtccgaattgcggccagaagcttgtataagaatcatacagtgaaaagtccggagtgatcagacactccggacttttttatttaggagaataagcgttacctattgcttgctcctgaacaggccattttcgagcacccgcttggataattcccagcagcaattgacgacgttcctttattgaattgacggcaatttgaaatgtttgctttgataaagccggtatgcctgattgttgaagctttgagatatctggttccggcggcgcttgttctgcaggatggatataggcagtatgaacggtatccaggtagtttttgatacttgagcgcgcttctttgatgtgaagctgattcggctgatattgttcaggaattccgtatttgaaaatggttagagcctcatccaatacagcaacagctataatggatgattcctgatgctgcgtgctgtggtaaaaatgaaggatggggaaggcgttatgctgagcggtcagctttcccagttctgatgaggcagcgacaagaagaaaatcaatgtcgtgaaaatctttgccattccatgcattatggacgatttctgttccgtcatgtcctagacttaatacactttgggcaaaggagcgtttttgattaaccgcactcaagacggaaatcaaatacgtgacagaaaacgtgatggtaagcagtccttgagctgtttcaataatcgtgacaagcttccataggcctccgttcggagcgaggtcgccatttcctaatgtaaacatgacatagccggaaaaataaattcggtctgaccaggaagccggttcttttgattgagtttccataagtgagtgagggtcactcgagtaaatcaaaacccacccgctccaaaatagactgatccatatcactaacgtcaggcataacagcagaggaccagccatacttagaacctttgcgtggtcaccgctgattttgcggcaacccttccacagccaggcagacaggcatcttgtgatcgggccggcaccgctctctaaccataacgtggtccataaaaaatcaatcatccctgctgtcaataataaaaggcctgcaatgatataaccctcattcattttggttgcctcccttaagtcagccttcttttattttcttctctatttccttttatcctaagtctgaaacaattgaacgaatgtttgattttagatgaagttacccaaaacttactcatttatcgatatgaacagaaaatcacaggatttttgacttgattcacacatttttatgaagaaaaacgttcattttccccttgaattggtgattttccttttatagagtaaaaaattttcagaaatttatattgactgaaagcgtttttataattatgataatatcagatataacaaaaatgtcactattatattactacaattgaactatcaagtgactattaaatgccaaatttacaaggttatgcacaaagaaatgaccattgttcttttagcgagaaatgaaatcgtttccatcaggactgacatgctaagaagaagggaaggttatgaggttattggataaaaacatgaacaactattttctgaagcctgcttacgaaatgtgaggaaggcagcagccctggaataagtttttgacatacgcattttgaaaaagactgggggaaacagtatgaataaacaaggcaatcaaatgtcatttttacgtacaattattttagtctccacttttggcgggcttctttttggctatgataccggtgtgctcaatggagctttgccgtatatgggagagccggatcagcttaatctcaatgccttcacagagggccttgtcaccagttcacttctttttggagccgcgctaggtgctgtgtttggcggcaggatgtctgattttaacggccgccgcaaaaatattttgttcctcgctgttatattttttatttcaacgattgggtgcacgtttgcaccaaatgttacggtcatgattatttcccgttttgtgctcggtattgcggttgggggtgcatccgtaacggtgcctgcctatttagcagagatgtctcctgtggaaagcaggggacgaatggtgacgcagaacgaattgatgattgtatcaggacagcttttggcctttgtttttaatgcgatccttggaacaacaatgggagacaactcccatgtgtggaggtttatgctggtcattgcgtcacttccagccgtgttcctgtttttcggcatgatcagaatgcccgagagtccccgttggcttgtttctaaaggaagaaaagaagatgctttgcgtgtattgaaaaaaatcagggatgaaaaacgggcagcagctgagctgcaagaaattgaattcgctttcaaaaaagaagatcagcttgaaaaagcgacatttaaagatctttcagtcccatgggtgcgccgtattgtgtttattggattagggattgcgattgtacagcaaattacaggtgtaaattcgattatgtattatgggactgaaattctaagaaattccggtttccaaacggaagccgctttaatcggaaatattgcgaatggcgtgatttcggtattggcaacattcgtcggaatctggctgctgggaagagtggggcgccggccgatgctgatgacaggcttgatcggtacgacaacagcgttattgctaatcgggatattctcacttgtacttgaaggatcaccggcacttccatatgtagtcctgtcattaacggtcacatttcttgcttttcagcagggcgccatttcaccagtgacttggctgatgctatctgaaattttcccgcttcgccttcgcggactgggaatgggtgtcacggtattctgtctgtggatggtgaattttgcagtcagtttcacgtttccgatattgctggcagctatcggcctgtccacaacgttctttatcttcgttggattaggaatttgctctgtcctgtttgtgaagaggtttttgccggaaacgaaaggactttctcttgaacagctggaggaaaacttccgtgcttatgatcacggcggggcgaagaaggattctggggctgaagtgattggataattaaaaaaagaatccgcacccgagtgcggattctttttggtttcaaattagttaggtctgacaaggattttgacttggcttttctctttaataagagccccgaagccttcctcgatcaaatcatctagtacgatttttttcgttacgagtttgtcggctgagaaatagccttctttcattaatgacaatacagccgggaagatgtcacggtatccgataattccttttactgtacgttctttgattacgatatcgttcggatggatttcagcacctttttcccaaatgctgacgatgacggtttcaccggcaattgtagtggactggatggcttgtcgtaacaccactgggacaccagtgacttcgaatgctacgtcaacaccgcctcctgtacgttctgcaatctcagcgactacatcgtctgttttagacggatcaacgatgatcgcgccaagctcctcagctttttgctggcgttcaggagaaagctcaacagcgtaaatatcagttgcaccggcagccttcagcgcttcaatgacaagaagtccgatcgggccgcagccgaatacagccgctttgtcgcctgctttgagtttgcttgagcggacagcgtatagagcaactgcagaaggttcaacgagcgcgccttgttcatatgataattcatcaggaagtttgaacaaaagctcttcatctacagagacgtattcagagaaaccgccgcctccgccggctaagccgaggaatcccatttgttcatcaaggttgtaggcgccttggtggccgtgtgtagcaaaaatcggctcgactacgacgcggtctccaactttataattttcaacgccttctccgacttcgacaacttcaccggagaattcatgccccattgtgacaggtgccgtttcatttgttaatgggtgcggtttgtcaaccggaataaagatcgggccgcccagatattcgtgtaaatcacttccgcagatgccgcaccatttgactttgatctttacttttcccggctccgtttttggctcttcgatatgttcaatacggatatccttttggttatgccatcttgctgccttcatggattaccactcctataacttttgatgtgagtaattccgcaccggtcaatatgaactgttcacaaaatcgccatttttaaaaccaaaaaagaaatgaaatttttatataatataatctacgtttttttgaaaaaagaaactttgaagaaaaaagggtctcgcacactcttttttctttatatgagagtatcaatcgtttacatagctatgaatttggtttgaacaatacggtaatggttcgttcatattgaatgcgacaactactctatcaataattataacgctaatactgctattataataggataatcttccatggtttattttagcagagtaacttttttgactttgtaacattactgtaaggatattgaaataaaaaatagctggttgatcgtgtataatcttcctagatgttaacaaacagggggacgaaatgttgaagaaagtcattttagccgcttttatcttagtaggaagtactttgggagcttttagtttttcatcagatgccagtgcgaaacatgtgaacggaaatattacttggtataatggagtcgggaaaaaaggctcttcaggtaagaaacttggacattgggattgtgcgaccaaaatcggatttgatgttcctagaaacgggacaaaaatcagagcttatgcaaaagcgaagcctaaaaaggtgattacggtttataaaaatgatgttggcagaatgcctaatgcagtgctggatgttagccctaaagcgtttaaagcgcttggatatccattaagcaaaggtaaagtagcggggcattacagctattaatgtacatatataatctggaaagcaagaagtcacattcttgctttttctattggtggagataaaagatgaaaaaaagaatcatattattattagcagtgataatagcggcagctgccgcgggggttgcgttttatgttgcaaaggataaaggctatgagaaggctgctgatgtttcagtcaataccgaaagcggtgatgagctgctggtttcaattacagatacggatctgctgacaaagtattatgaaaatgacaaggtgatccatgaggagaagctgaccagctatccggcatttgccttggatcaaaaacagcaggtgctctattatacgggcaataatgaacagaatgaaatgaggctttttaaattggatctgaagtctcataaaaaaacgatgctttataaaggcgcggagagtgcggacagtttgtttttatcaaaggaccgttcaaccatctatttccgcttaggaaaagcggacgaaagcaattttcggatcgccgcttttgatctgaaaacgaaaaagtacaaaaatctttatcctgccgctaatgatcaggataacaccgtcagcagcttcttttataaccaaaaaaacgattcatttgcattgcttcattattctgtagaagaagactacaagaaaacagatgaagcaaacgaaaagggcatcgacccagaaccgacaacgattcattttgcggaaggccgccaaaataaatttaatgagctgaaaagcctgaaccaatttatcagcgatattgctgtttctgttgatgataaacgtattttattcacatcatatacgcaaaaaggaacggagcaaaccgcttctattcaaatgctcaatgcggatacgaaaaaatatgaaagcatcatctcaaatcaaaaatcatttaagctgttaattgacgcacagcctcagttctctaaggatggaaagaacatttattttcttgccgaagccaagggggctaaaaagctgaaggacgaaacagggcgtgaagctaaggtgcggacgatttattcctatagccttgaaaataagaccttcaaaaaagtatgggaaaatccgaacggcatcatcaacagcttttctgtgattaactaataaaaaccactcggcataagctgagtggcttttttaatggacgaggtgcagggctaatgattcgagccatttaaagatatgaatcagaggtaccgacaaaaacagaagttcaacatatgagttcattgcaacattcagctttttgaacgcagctctttttttcaagtctttttgctgctggtttgagatcacgttatcactcctcgtatatccatattataccattgaaacagacaaaaaaagccctaaacgtttacagttttgggcttctttcttcgtatttggcctcttgcaatgagaggcttttattctgaaatatagaattttgtctccgttcggggtttgttgcttgcgggagactgcatttgttatagggaagaactagcttgttttcgtttggctgttgttttggagattcactaatgaacggatgccgtcgaccattttacttccgcacaaagggcacaatggcgtatcactgctggcgaagttttttcgggtccagccattacagtcttcttttgtgcattcccaagtactcacatcttcttttggcagcggttcttgatttcgtttgttatagtaagacataaagtcacttcttccctcatgtattttactgcacatttcttattgtctcatacttttccctaatctcctaattcctttttctttatgactttccaataaccccatctaaaaaggagaggagtgtgctgttaaaagcatctggctcttctaaaaacgggcaatggctgcttttaggaaaggtaacgagtgtcgcgtttggaatattgctgcgcaagtgttccccagctgctgtagagaaaaatttcttgtcttccccgaagcacagcaatgtcggcacattgatgttttggagggtgccccggtaatcagcggccgtttggttaaataaaatcgtgctagaaatggcagccggctgtttgaggatttctgccagcatccattctgtttcggtctcggcaggcggttctgcgaacatattctggatgaagctttcgtagaaaggcagcgggtcagtttgaatggcgtgcatcgctgtttttaagccgtcaaaatcaaatggaccatgttcccagccctcccattgatagtccgaagcggattgatcgatgatcacagcggcttgaatgttatcattcccaaactgattgagataatcccatacgacaaaagcacccattgaccagccggcaagaacgacatgatcaagctccattgcatttagaaattcccttatgtcacgggcatattgggaaatggtgtggccgtgaagcactttgtcagattcgccgtgtcctctaagatcaagacgaatacattgataattggcagaaagcgccgaaaattgtttgtggaaaaattgtccgctcatcagcaccccatgtataaacaggatcggcgtcccgctcccgtgtgtttcatagtaaaggcgtgtctgatcttctaatgtgatgtatggcatgtttctcctcctttagtttccatcatgagtatggctggctgctgttgagctgatgatgacagctgtcgcggctgcctgctgcgcttgaatggctgtttcgatagcggtgtatagtcctgattccatcagcagatttttctccatatgctcactgagatagaggctgacagcaattttaaaattcatttccttttgccatttaaaagctttttcctggtttaattcgtcagtgatgcacaaaaccgttttgatatctggctcttccagaaatgtgaggagagcaaggtctggataatgataatcctttggttttttgacagattcagtgatcgattgatatatctgtttgcaagcggaaacaagcatttcgggctctttttcactttgcaaggccagaatatggctgacctgatgtaagtactgtccttttttaaagccgttggctgccagcagctgatagcatgtttccgccttctgtagcgcctgcaaaccttctccgttttctccaagcagtacggcaagcggaacattctgagttgaagtgaggaaataatgatttttcttcatctgctgataaactgctagccccatgttcatctgttctttttggtttgtcgtttcagattttccggtgagcaagatcagagcggaaaggtatgtgaacatatcccgcttatatcctagcttcaccatttcattgtatacatcgataaaagtatgaaatgtttgttttgcctcatgctgaaaatgaatgtccagaatagatgcaacagtaaagcggtggtgtgaattgagtgttgagaagctgccgatgtttgatttgatatagctgctcaaatcataaaagcgctgaaaatcaaactctcttttattcacaatatatgcagaagaaatgagcattaatatctgatcgtgtgaaactttccattttaattttgattttaatttagcataaatggaaatgtattgctttattttttcatgtagatcgtgtgtgagcataaaaagcagctccttttgttgtttttacgtaatacgataaatagggccaaaggtttcataaagaaaaaacttgcctgctagaggcaagtttgtcggattatttatggggatctgttatatccatcggtctcatcatgtcatagtcttcatgctctagaatatggcaatgccatacgtatcgtccgctgtacggaccgaatgtcgccgcgattctcaggacttcacctgcatgcgcttgaatggtgtctttccagcccttttcacttggcggcggcgggacagccggaccggtataggacaattccccgctttcttgataacgggcgatatcaaacggccgccggtctaatacacggaaggagactagatgcaggtgaatcggatgtgttccgcgtgtcgggttgataatggaccatatttcagtagtgccgacttttggtgcttctgtgacgggatcgtgccagcgtttgttattaagcagaaggacgggtctgccgtattcgtcctgggtgcctgccagttttaacgttctgatgttttgtattctttcatgctgtaccgaagggtatgaggcgaggtacttcggctttctgctttcgtctttttgtgccaatggttttgtgactctgaattgcatgatattagcatctgtttcaggattgacgtcaccgccacagcccgcgctgtttgccaaaatgatcgattctccttcatatgctgtgaagtcaatgatgatatcgtaacgttcagcaggcgcaaggctgaaagaattcagtttaacagatcgcggcaggagacctccatctgaaccaatctgaataaactctccgccattatcgagtgacaggttataggttcttgtattggaggcgttgatgactcggaatcggtatttcctcggctcgacctccaagtatggccataccttcccgttgacgagtatggtttctccgcaaaaagccggaacgattgaaggattaggcagtgacggagaagggttttccggtgcgctcggataaaacaaagaaccgtcctcattgatcgtgcggtctgtgataagaagcggcacatcgtattcgtctgaaggcagttttaagcgtttttcctttgggtcatgaatgatataagcaccgacaagtccggcatagacatttagcctggtgagcgccatggcgtgatcgtgataccacaatatagccccgcgctgctggtttggataatgataaacctctcttttgaaataaggtcctgtttgttcaaagtctttggaaaaccaagcctcgggatacccgtcactgtcatctggcgtgacgccgccgtgtaaatgaacaacagtctttacctcggactcttcatgctggctgtcactgtgatgaatggtgtgatcaatcggaaggaaatgcgtggaaggtaggttattcatccattttacatatacgttttcatttcttttaacctcaatggtcggtcccggaaataagccgttgtagccccacaggcgggtcggagggagatcgcgatggagctgatgggtgcattcctccatggtcacttcgtagtatgttttttcttttgattgctgtactggctttagtgtatctgggattgggagagcatccacaaatttttcaagtgtcattttcatctgtccttatctaaattttccaaattggtactatagttaatgacaataaggacgtgatggttacaaaaaatcttcgtgctgcagactgcccgagaaagaaaataacaaaatcctaaacggcagtccgtttaggatttgatcagcattaaggcaggatatcgggttgctgctgtgtgactgggttggcagccgctttctcgctcaccttgcgttttctgaacacaaggtaagaaatcagaacgattcccgtgatgacgcctgtcagcagcagctcgtctctcatggaatcaataaacgccatggacactaaaattccacaaatggcgatgatggtcaagtaggttaggaaagggaagagccacattttgatcttcaatgcttctgggtttgttttttcgagttttttccgcattttcagctgggaaacagcgatgacaagatagacgagtaaagcgattgcgcctgatgagttgactaagaataaaaagacggtatccggtgaaaaatagttcattacgaccgcgatataagagaaaaatgtgccggccacaatggcttgtacgggaacgccttttttgctcaatttcataaaacggcgcggcgcttcgtttctttctgcaagtgaatacagcattctggatgtggtatacaaacctgaattcaggcaagagagtacggctgtgaggacgataaagttcataatctgtgcggctgcgggcactcctatatgctcaagtacagcgacgaaagggctttctaaaatatttgctgaattccatggcaacagcgccacgacaatggcgattgagcccacgtaaaagacgatgatgcgccatacaacggatctggtggcttttgtcacagattcgatcgggttggatgtttcccctgctgcaatggcaacgatttcagttcccataaaagagaagatgacaacgacaatgccgagcaatacggagctgatgccctccgggaaaaatccgcctttgcctgtaagattcgaaaaaccgactggctcactgcccggtgcaaagccaaaaataaaggcaaaaccaacgattagaaaagcaatgatagtcacaactttaatgagggagaaccaatattcaaactcaccgaaagacttaacggagtagacgtttgtcagggtgagcacaatggtcaagatcaaacttgtcagccacagcggaatatcatggaaccagtattgaataatgccagcaccggcaatggcttcgatcgagatgacgatcacccagaaaaaccagtacagccagccgattgtaaatcctgcccacggtccgatggcgtcgtgagcgtattgagaaaacgatccgctcgtcgggtttacggcagacatctcaccgagcattctcataataaaaatcaccaataatccggctaacgcgtaagaaacaacggcacccggaccggtcgagtgaatcactgaaccgctgcctacaaataggccggctccgattacaccggcaatcgaaatcattgtcatatggcgggtctttaattccttttttaatcctgattgagattggttcataagttacctccttttaaaatgcaatcattactgaatattatgataattgaaactctatcataaatatacagtttgtcgaaaattcatgtgagaaaatataacgttttatttcaaatttgtagtgttttgtttgcgctttcagcgaatgtgtggaaaaaatgtttcgttttttatttgctgtgtgattttgtgtactatttacaattcgatagaatgcgagaagcgctggtgtcattggatctgatgggctttttggcggagcaaataaattggatgagagaaaaagtgttccatcgtcactatttttctgtggcgggtgaatcatgtttctgtagacccactgcggttcagctttgtaagataataataggaaaatgtgagcggggaggaggttttgtatggagagatatgatgaactgaaaaagggagaatccggggcgctggtcagcattgccgcgtatcttgttctttccgcaattaaactgatcatcggttatctttttcactcggaagcacttacggcagacgggttaaataacacaactgacattattgcttctgttgctgtgctgattggcctgcgcatctctcaaaagcctcctgacgaagatcatccatacggccactttcgagcggaaacgattgcatcgcttatcgcatcgtttattatgatggttgtcggcctgcaagtgctgttcagtgccggagaatctattttttctgctaaacaagagacgccggatatgattgcggcttggacggcagcgggcggggcagtcctgatgctgatcgtttatcggtacaataaaaggctggccaaaaaggtgaagagccaggcgctccttgctgcggctgctgataataaatcagacgcattcgtcagtatcggcacatttatcggcattgtggctgctcaattccatcttgcttggattgatacggtcactgcgtttgtgatcggtctgcttatttgcaagaccgcatgggatatttttaaagagtcatctcactctttgacagatggattcgacataaaggacatttccgcttataaacagacaatcgaaaaaatctccggtgtgagccgtttaaaagacataaaagcaagatacttgggcagtacggttcatgttgatgtggtggttgaggtatcggctgatttaaatattacggaaagccacgatatagccaatgaaattgagcggagaatgaaggaggagcatgcgattgattattcgcatgttcatatggagcctttagaacaaaaataatggagcttcctgccacaggaagcttttttgtgtgttttggccagctttattggaaacaatttgctagaatcgtttttttatacagattgctttttgtggtaaagttaggttacattatgatgaattttgtagatgactaggaggaaaagaatggcatatcaagaagacctgcatcctttgctggggaaagcagttgaacatattaatagagtaatggttggaaaacgagacatcgccatactcagcttagcagcccttcttgcaaaagggcatgtgctgcttgaggatgtacccggagtcggaaaaacgatgatggtccgcgcgctggcaaagtcaatcggcgctgatttcaaaagaatccaattcactccggatttgctgccatctgatgtaacaggggtatctatctataatgcgaaaacgatggaatttgaatatcgtcccggcccaattatgggaaatatcgtgctggccgatgaaatcaaccgtacctctccgaagacacagtcggctttgctcgaagcgatggaagagggaagcgtcacggtagatggccatacgatgcagcttgccgctcctttttttgtgatggcaacgcaaaacccggtcgaatatgaagggacctatcctttgccggaagctcagcttgaccgttttttattcaaacttcggatgggttatccgtcctttaatgaagagcttgacgtcttatctcttcaggaaaaaagccatccgattgagacgcttgagccggttattgcaaaagaagacttcatctgtttacagagggaagtgcaaaatgtccgtgctgatgacagcattaaggaatatatcgttgaaattgtgcagaaaacgagacagcatccttctgttcaattaggcgtcagtccgcgcggctcaatcgccctcatgaaagcggcacaggcatacgcgctgctgcatcatcgcgactatgtcataccggatgatattcaatatttagctcctttcacgctgccgcaccggatgatgcttcatcctgaggcaaaatttgaagggattcaggcagaagcgatcgtaagggagatcatgtcagctgtgaaggtgccggttcaaaggtcgtcggtccgctgatgaataagaaatggcaatggctcgtatatggttggaagctgattatattaactttattgacggctgctgttttttcttatgcgatgtttcagggcggctttgtcagctggtttttgttttacgcgtttctcccttttgtcttgtatgccgggctgttggccttgtatccgctccgttcttttcaggcttcaaggcaaatggataaaacacaattgcatgcgggggacaggctgggtgtaacggttacgctgagaagaaagctgccattccccctgatgtatatggtgattgaagattgcctgccagaaggtatcgagtcattaaatcgagacggagccgcggccaaacggctcgtttttccttggtttaaacggagcatgacgatgtcgtatgaattagctcgggtaccgcgcggagagcatcactttcattctgtcagggtgcgaaccggggatgttcttggcttgattgaaaaaacagcattttttgagctggatgataccctgtttgtttatccattctatcagcgtttttcctatcaggtgaatgagaggcatcaggaagacggtgtaagcggttcttctcctattcatcagcaccattcctcagtcgcagcaagtgtgcggaattatcagccgggagaccgatttgctgcgttagattggaagacatctgcacggcggagccagctgatgacgaaggaatttgagccttctcgcagcaaaaatctgtttctgctgatggaccgtttttcctcagacgcattcgaagaggtcgtttcagtgacagcttcgattcttcattctgttttaaaaaacggcgcgggtgctggtctggcttccatcgggaaggaaaaaaacattttccctattcaggaaggggatcagcattttaagcacatgcttcggcatttagccatcgctcattgtgatgcggcagacccgataagccgatatgcacgggaagagctgggaaagccatctgttcgccaagctgatcaagttgttgtcacgggacagttaacggaagatatgctgcacctcgcagaaataggaggcggccgggttacggtgatactggcaaaagagaaagatgctgagctctctcaagctgaaaatgtcatgattgaacgcatgatgaaacgccaaatcagagttcgggtcatgaggggcgggcgagtttcgcgtgttgtttagaaagagaggtgactggttcacatgccgcacgatgatcacaaggggagccgtttgagcttgctgttattttattttctggcttttttattgctgtgggagtggctcaggccgcttgacagttttactgaaacgaaacatacaggcttttttagtgtctttatcggcttgacgtttctgctgacttttttcaggatgaggtggtttgttaccgttcctttttgtgtcttatttacattgatctcgatacacatcctgttttatcaaggatctatattcgacttgagctgggtcagctcttttttgcaggatgtctatctgaatatcacgctgattcaatctgggcaatggaatgacatgattccttcatttcggaccctgctgttttttgtgctgctgtggctgctggtctatctcctgcattattgggtgatttaccagagaagaattttgtttttctttatgatgacagtagcgtatattacgattcttgatacctttacgccatatgatgccacttttgccgtcatccgtatcgtgctgatcggcttctttatgctgggccttttatacttggagcgcattaagctgatggaaagaatcacactgccaaaaacatctgtcctgaaatggtttcttcctttatctgtattggttttggctgcaacgggattcggactcgccgctccaaaatcagatccggcctggcctgatccggtgccttttcttaaaaaaatcactcatcaagaccgcgtgtctgcaggggaaagcaaaatcggatacgggaatcatgatgaatcactcggcggcccgttccagcaggatgctacacctgtttttacatggcagggaaaagagcgtacgtatttccgtgtggaaacgaaggatacgtataccgggaaaggctggattgaaacagacacaggcatgtcgtatcagcttagcaatggaaaagttgaaaatctgtggtttgaccataaggttgcgacagagcgccgcaccgtccgtgtaaaagtcgataagcactacgggtataatcatctgatgtatccgattggtgcggaaaccattcagccaaagcaggctgtctcacttgaaatgaacggcaacacggagcaaatttctccgatcagtgaacaagccggtgaaatcagaaatatgggaaattatactgtaacgtacaattccccggtctataagctggatgaactgagaaaggtaaaagtgagaaaaaacagtgaggagtacacattcagcgatcgctacatgcagcttccagattcactgccagagcgggtgagaacccttgcgatcaaactgactcaggatcacgacaatatgtttgataaggtgaaagcggttgaggactatttagggtcaaatgcgttcacatatgaaacagaaaacgtgaccattccgaagaatgatgaagattatgtcgatcaatttctctttgaaacgaaaatgggttattgtgataacttttcttccgccatggtggtgctcttgcgctcggccgggattccggcccgctgggtaaagggttatacgtccggcgaatacaaagaagcaggaaacaaaaatggcaacatctacgaagtgacaaataacaatgcccattcctgggtagaggtgtatttcccggaacagggctgggttacatttgagccgactaaagggtttacaaatccggctgaatttacttcttctcacacaaaggactccggcaacgataacagcagctcgccgaagaaagcaaaacagaaagaagaggaaaaacagccgcaaaaagaggaaaaacaaaaggaaaagcgggagccagctgtttctaaaaagccgtccgcttcgcatactaatgccggtgcgggcttgtatgcagcgcttgcggttcttgcagtcctcttggtggcagctgtattgctgtatgttttccgctcgttatggattcctgttttcaccgtgaggaaattgaagcggcgcagcgatcagcacgcgttttttgaggcatatgacgcgctgctgaaacaactgaagagaaaagggctgccgaaacgaggcagtgaaacgctgcgtgattatgcaaaacgaatcgatgaaaaatacgacatagaagacatgtcaaagctgacattaagctatgaaagggcgctttacagaaatgaagattcttcagcgctttggaatgattccagagagttatgggaaaatttaattaaaagaagatggtcttgaccgcttatcaacgtgttgttagaattagtgaatattatcggagtctgggagcgagttggcctgactccggcaaacggccttgccaaagagggcggagcgagcttcatatctgtcctcgtttttttctgtgtcaaaaaacttagaggagattaggtgacaaccatgacaaagttagtgaatgaaatgattcttgtccttgatttcggcagtcagtataaccagctgattacacgccgtatccgtgaattcggtgtttacagcgagctgcatccacatacattgacggctgaagaaattaaaaaaatgaatccaaaaggaattattttatccggcggtccaaacagtgtgtatgatgaaaactctttccgctgtgacgagaaaatcttcgagcttgatattcctgttttgggaatttgctacggcatgcagctgatgactcattaccttggcggtaaagttgaagcggcaagccagcgtgaatacggaaaagcaaacatccgcatcgaaggcacacctgatttgttcaaagatcttccaaacgaacaagtggtttggatgagccacggcgatttggttgtagaagttcctgaaggcttcactgttgacgcgacaagccatcactgcccgaactcagcaatgagcaaagcggacaaaaaatggtatggcgttcagttccacccggaagtgcgccactctgaatacggcaatgatcttctgaaaaactttgtattcggtgtttgcgaatgcgaaggcgaatggtcaatggagaactttatcgaaatcgaaatgcaaaaaatccgtgaaacggtcggagacaaacaggttctttgcgcgctaagcggcggcgttgattcctctgttgttgctgttttgattcataaagcgatcggcgaccagctgacttgtatctttgtagaccatggtcttctccgtaaaggcgaagctgagggtgttatgaaaacattcagcgaaggctttaacatgaatgtgattaaagtagacgcaaaagatcgattcttaaacaaactaaaaggcgtttctgatcctgaacaaaaacgcaaaatcatcggtaatgaattcatttacgtgtttgatgatgaagcggacaagctcaaaggcatcgactaccttgcacaaggtacgctttacacagatatcatcgagagcggtacagcaacggcgcaaacgatcaaatctcaccacaatgtcggcggacttcctgaagacatgcagtttgagctgatcgagccgttaaatacgctcttcaaagacgaagtgcgcgcgcttggcacagagctcggcattccggatgaaatcgtatggcgtcagccgttcccaggaccgggactcggaatccgcgttcttggcgaagtaacagaagaaaaacttgaaatcgttcgtgaatcagatgcaatcttgcgtgaagaaattgcaaatcacggcttagagcgtgatatctggcaatacttcactgttcttcctgacatccgcagcgttggtgttatgggtgacgcaagaacatatgattatacaatcggaatccgtgccgttacatcaatagacggcatgacatcagactgggcacgtatcccgtgggatgtgcttgaagtcatttcgacacgtatcgtaaacgaagtgaagcacattaaccgcgtggtgtacgatattacaagtaagccgcctgcgacgattgagtgggaataagtaaataacaatgagaaaaacgtccctttttcaaaaggggcgtttttttgttaactttttgaaaccgtttcgacaatttttgtatctaacaacataggaggtggataaggtgaaggaagacagattgattacaaaggcgagaaaaggaaatgctcgggcctttgaaaagcttatgctggcacatcaggagactttatataaaacagcttatctctatttaagaaataaagaagatgcacttgatgctgtacaggaaacggcttataaagcttttataggtatagaaaaactaaaagagccaaagtactttttaacgtggctcacccgaattcttattaattcaatttttgcaatgaagaaaaagaagggggaattagttccgtttgaaagccatcatgacactggcacggaccaaaggaatattgaagaatatatagacttgcgcaatgcgctggatacacttgatgaacatgttcagttaacaattcagctctattattttcaagattattcgatttcaatgatagctgaacaaacaggaatggcagaaggcacaattaaaacccatttacatagagcgagaaaagcattgaaacaggagctggaaaaggaggatcaaaacaaatggacaaacaccaaatgaagcagatatttgataacattgaagtgccaaagaaagtactcaaaaaggcaatacatcaagctgtcgttcgtgctgaaaatgaaagtaacacaaggcgccgttttaaatgggcacgaactattacaaatggaatggctattgctgctgtggtatgtatattgtatttatcatctggtctttttcttccctctgtaaacaaagcgatggggagcatacccattgtcggacaaatttataaggattttcaagataaagttggtctatcattgtttaaaagcaatttggtcacagctttaaatgaaaaagcagactccaggggaatcactgtttcggtaaacagctcctattacgatgccgggcagcttgtgtataactttactgttgataacctccagtctgatgaaaaagagctcagttataatgtgagtaaagcgagttttaacaataatttttcaatcaactacgattccttaatgctcaaaaaattaaataacaaacaatatgctggtcaattaaggctttatacaaaagggacagaaataaaaaatggggataccgtgccttttgtgattactcatatcaatgaaatacagggaaattggagattcaaactgcctattaccaaaaagaatgcgagttatttagaaagctcaaaagtggtatcagtgcttaacaatcattatcaattttccaatattcaagtggagaacggaaagctcggatctgtccttcaatttacaatcgattatcaaggcgtagcaaagcatgatacggttgaaattaacgaagtcaaagatgatttaggaaacacatatgagatgacagcgtcaaacatccaacttggagaccgcaaaaaagtaaacgagagaacggtaagagcaaaaggacaaacacagttagaatcaccaattaatccaaaggcaaaaaagctaacattaatagcaaatattaaatctgaggcagagggcagtgaaattgtcccgctaaatgcagagatgccgtttcatgtttcagaaacaaaccatcaaaacatagggattgaaatcaataacattaaccaaataggaaagaaagtattggttcattaccatttcactggaattgatacctcaagcgtggacgaaaataaattagtgaatatcggtgaaacgattggccttggtgatataaaaaaaatgcaatcttggcctgatccagtaggtgattatgaagaaggttattatttgaaatggaataaagctgaagtgaagaatatggacacagccgaaatggtatctacttttgaactggatgacgcttatcttgataagctgtctttaaagcattttgagtttaatgaatacggtctgtatattgataaaggcgttttaaatgacctgattcaactaaagccattctcgtttactgtaccagtgcatcaggtgagtcagcctaccgaaaaaaaataatcataagttgaaaagccgtatgttgccatacatacggtttttatcattgttaccaatttagtcaatagacgaataaaccaatttttttaataagtaatgttcgttgtttatattgtcaattcaaaatgaacttggtacaatagacacagaaatcaaataagatgaattcgtataatcgcgggaatatggctcgcaagtctctaccaagctaccgtaaatggcttgactacgtaaacatttctttcgtttgatataaataaaacacgtttatttattcaaactgaaatccgtctgtagtcaagcgtcccaaaattattggggcgttttttatttggcgatttcaggacagaataaatagcaaagagtgaagggagtcaaatagcttgaaaaagtattttcagtttgatgagctgggcaccagctatcgcaatgaaatcattggcggattaacgacttttttatctatggcatatattttgttcgtcaatccgattacgcttgctttggacagcgtgaaagattttccggaggcgctgagaattgaccagggtgcggtctttacggcgacagcgctggcgtctgcagcaggctgtatcttaatgggattaatagcgagatatccgattgccatcgcgccgggtatggggctgaacgcgttttttgcgttttctgttgtccttggtatgggtatttcatggcaggcagctttgtctggtgtttttatttcaggtcttattttcgttgctctttctttaacaggttttcgtgaaaaaatcatcaacgccattccgcctgagctgaaattggcagtcggtgcggggatcggcctgtttattacattcgttggcttacaaggctcaggaatcattactgcaaatccttctacgctcgtcacgatcggaaacattcacagcggtcctgtgctgttaacgattttcggtgtgattgtcacggttattttaatggtgcttcgcgtgaacgcaggcgtgtttatcgggatgctgttaacagcggtagccggcatgattttcggtttggttccggttccgactcaaattatcggcagtgtgccaagccttgcgccgactttcggacaagcgtggattcacctcccggatattttctctgtacaaatgctgatcgttattttaacattcttgtttgtcggattttttgatacagctggtacacttgttgctgtggcaacacaagctggtttaatgaaggaaaacaaattgccgcgtgcgggccgtgcgcttttagctgattcatcttctattgtgatcggtgccgtgcttggtacgtctacaacaacttcttacgtggaatcaagctcaggtgtcgctgcgggtgcccggtcaggatttgccgcaattgtaacagggattctctttttactggctacgtttttctcgccgctcctatcagtcgttacgtcaaatgtaacagcgccggcgcttattattgttggtgcattgatggtggcgccgcttggcaaaatcgcttgggataagttcgaggtggccgttcctgctttccttaccatgatcatgatgccgttaacgtacagcatcgcgactggtattgccatcggatttattttctatccgattacaatggtgtgcaaaggaaaagcaaaagaggttcacccaatcatgtacgggctgtttgtcgtatttatcctgtactttatcttcttaaaataaggaatgaaaaaccagctgcaccggcagctggtttttttgttgcaatagataaaaccatttcatacgatataccgtcatgtagatgtgccgccatgctttacttaaatggaaatgacttgactgttcaggaaggcttcggtaccttatataagtgttttattttcttgctgaatggtattccgccgtatttttttgataggagttgctgacatgacggaagaaagaaaagaaacgtttgaagaagaaattaaccagagtgaaagaatagatgcagatgaagaaccgctatcgagaatgtccagaaaggcgagccggcaaagcaagcagaagcaaaaacaaaaacagaaaccgcgccaggaacgcggtgaatcaactgttaaagtcaagcttgcgtctgtttgggcagccatcaacagatattgcggttttgcgttctcgattttaaaatctccggcgaaaactgtcgtaacggatggtttttctcattataagtacggtctgatttcaatgcttatattcagtatcattttttcaattgggaattggtttcagttaaaggcaagctggaatcggccgctcggtttcggagaacgccatcatgctttctatgacgggtttttagttgttcttgtgtatttgctgatctttttcgcggtaatggtctttgctatatgggctgtctcccgctatatgatgaagcagaaggtgacgttcagagaagcggctgccgtattgggttcattgcttgtaccggtaattgctgtttcaatcctttggctgatctttgcgatcgtaaatattccaatgctgacagtactgtttacggtgctgatcttgttttccatcttttttatcatcgcgctgtatgtacagcgtgtgtaccaggcggcacaagatgcaccaattgattatatctattgtgtatttgcagtggttgcgatagcgctgctgtttacggcagtgacttggccgtttatttctgaatattttacggcgtcgctgattccgctttaatgaaaaaaccggctaatcctagccggtttttttatgtcacactttttacaaatatatctaaaaaacatagttgatttgtaggattaacccgtgtatgatggggaaaatgctgaaaacgtccagcgcaaaaacctttatgtttaaggaggatgatggacatggctgatgtgcttcgccgagcaattaaccaaaagaagcaatttttaaaaaccaaattactgctctcggaattttatcaaggaagaggggaacagcttgcggactacacgctgagtgagcttgagaaagaatacaagtcccttcagaaaatgaaaaaagagatctgacaatagatataaagaggtgagtctgctgaaaagcgggcttttttgttttgattttgaaaaggcgagaaagagggtaaactactactgttcaacgcataaaagcatgtcgaaatattttgcttaagcttacgggcgaagctgattgtaaacggctcatttctctagtagaatatgaatgctttgtgcaagctgaagagtagggggatgaataaaatgatgcaaaccatcttatcaaatgggatagccatggttctcataattctcattattaatattgtctatgtgtcattttttacgataagaatgattttaacgctgaaaggacagcgttatttagcggccggcatcagtacgattgaaatactggtttatgtgacagggctgagtctggtgctcgataacttagatcagattcaaaatgtaatcgcgtacgcgctcggttacggtcttggcgtaattgtcggcatgaaaatagaagaaaaattggcgcttggctatattatggtcaatgtgattacgaaggagctcgatcttgatcttccgaagcagctccgcgaaaaaggctacggcgtgacaaattgggtggcaggcgggcttgaaggcgaccgcacagcccttcagatcctgacgccgagaagatatgaactccagctatatgatacgattaaaacacttgattcaaaagcctttattattgcgtacgaaccaaaaacaatccacggcggcttctgggtcaaagcggtgaagaagaggagaattaaagaataatggcaaagccgaagaagaaaaagtttgaagtgacagagcagcaaacgattgatgcggtgcttcagcaaatgaaagaagaaggatatctgcctgtaaggcgaatggaagagcctatttttatggaaaaaaaggaaaatgggtcaattcagatcgttccgtgcgggaaaaaaatcgtatttgaagggaaattgatctaaaacacgaacattagtagaaagaatttttgtatcgttcgataatatcgttgacattatccatgtccgttgttaagataaacatgaaatcaaaacacgacctcatataatcttgggaatatggcccataagtttctacccggcaaccgtaaattgccggactatgcaggaaagtgatcgataaaactgacatggatatatcgcagaagcgaacgactgacgatacatgtaccatgcccggtttgtattgcttcctcataagtgcaatgcagagcgggtattttttattttctgaaaacaaaagcattagaaggtggggaacagaatgcagccgctagtaggaatcatcatgggaagcacttccgattgggagacaatgaaacacgcatgcgacatacttgacgaactcaatgttccgtacgaaaaaaaggtcgtttccgctcaccggacgcctgatttcatgtttgaatatgctgaaactgctagagaaagaggcatcaaggtgattattgccggtgccggaggagcggcgcatctgccagggatgacggctgcgaaaacaacactgccagtcattggagttccggttcagtctaaggcgctgaacggaatggattcacttctttccatcgtccaaatgcctggaggcgtgcctgttgcgacaacatccatcggcaaagcgggtgctgtgaacgcaggcctgttagcggcgcaaattttgtcagcatttgacgaagaccttgcccgtaagctggatgagagaagagaaaatacaaaacagacagtgttagaaagcagtgatcggcttgtctaaacaaatcatctatccgggagctgtaatcggcattatcggcggcggccagcttgggaaaatgatggctgtgtccgccaaacaaatggggtataaagtcgcggtcgttgatccggtgaaagattcgccgtgcgggcaggttgcggatatcgaaattaccgctcattataatgaccgtgaagcgattcgaaaattggctgaaatcagcgatatcatcacatatgagtttgaaaacatcgactatgatgcgctgcattggctgaaagatcatgcgtatctcccgcaaggaagtgagctgctgctcattacccaaaaccgtgaaacagagaaaaaagcaattcaatccgcgggctgtgaagtcgcaccgtacagcatcgtcaaaacaaagaatgaattgaaacaggcggtacaggagctcgggttacccgcagttctgaagacatgccgcggcgggtacgacggcaaaggccaatttgtgataaaagaagaggcgcaaatggagcaggcagccggtctgttagaacacggaacttgcattcttgaaagctgggtttcttttgaaatggaactgtcggtgatcgtcgtcagatcggtaaacggtgaaatttcaacatttccgacagctgaaaacattcaccacaacaatattcttttccaaagcatcgtgcccgcacgggtagagaaagggattcagcagaaggctgctgatctcgcagttaagcttgcagatgagcttaaccttgtcggaccgcttgctgttgagatgttcctgacagaggacggagagcttttggtcaatgaactggcgccaagaccgcacaattctgggcattatacgctggacctttgcgagacgagccagtttgagcagcatatcagagcggtatgcgggcttccgcttgggaagacagatttgctgaagccgggcatgatggtgaatcttctcggcgatgaagtgaagcttgtggaggaagacccggagcttttaaaagaggcaaagctatatatatacgggaaacatgaaatcaaaaaaggccgcaaaatggggcatattacatttatgaagcagcctgaagacgaatggattcaggagatcacaaataaatggatgaatagagacggaggacaagcagaatgatcgaacgttattcaagacctgaaatgtccgcgatttggacggatgaaaacagatttcaagcatggctggaggtagagattcttgcctgtgaagcgtgggcggagcttggcgtcattccgaaagaagatgtaaagattatgcgcgaaaacgcgtcatttgacatcaaccgcattttagaaattgaaaaggacacgcgccatgacgttgtcgcttttacacgcgctgtttccgaatcattgggcgaagaaagaaagtgggtgcactacggattaacgtcaactgacgttgttgatacggctctttcctacttattaaaacaggcaaacgatattttgctcaaggatcttgagagatttgttgacattataaaagaaaaagcgaaagaacataaatacacagtcatgatggggcgcacgcacggcgtacatgctgagcctacaactttcggcttaaaacttgcgctttggcatgaagaaatgaaacgtaatcttgagcgcttcaaacaagcgaaagcaggcatcgaggttggaaagatttctggcgctgtcggcacatatgcgaacattgatccatttgttgaacaatatgtctgtgagaagctcggattgaaagcagcaccgatttcaactcaaacccttcaacgtgaccgccatgctgactatatggcaacacttgctttgatcgcgacaagcattgagaaattcgctgtggaaatccgcggactgcaaaagagtgaaacacgtgaagtagaggaatttttcgcgaaagggcaaaagggttcatctgcaatgccgcataaacgaaatccgattggctctgaaaacatgacaggcatggcgcgcgtgatccgcggctacatgatgacagcttacgaaaatgttccattatggcatgagcgcgatatttctcattcttcagcagaacgaattattcttccggatgcgacaattgcgctgaactacatgctgaaccgcttctccaacatcgtgaagaacttaacggtcttcccggaaaacatgaagcgcaacatggaccgcactctcggccttatctattctcagcgtgtgctgcttgctttgattgacacaggccttacacgtgaagaagcctatgatactgttcagccgaaagcaatggaagcgtgggaaaaacaagtgccgttccgcgagcttgttgaagcggaagagaaaatcacgtcacgtctttctccagaaaaaattgctgactgctttgattacaattaccatctgaaaaatgttgatctgatctttgaacgtttaggtttagcatagaagaagcttttagcggcttcttctaagccgccgatgtttgaaaattcccaacattcgggttaggaggccttccgtgaatattgtgaagaatgaacttttatacgaaggaaaagcaaaaaagatctacaaaaccgatgacgaaaacacgctgtatgtcgtgtataaagactccgccactgcctttaacggcgagaaaaaagcagaaatcagcggaaaaggacgcttaaataacgagatttcaagcttgattttcaaacatcttcatacaaagggcattaacaatcactttatcgagcgcatttcggaaacggaacagctcattaaaaaggtaacgattgtgccgcttgaagtcgtggtcagaaatgttgtggcaggaagcatgtccaaacgtctcggcattccagaaggcacggagcttgagcagccgattatcgagttttactacaaggatgacgcgctgggtgatccgctcatcacagaagatcatatttggcttttgaaagcggcgactcctgagcaggtagaaaccattaagtccattacaaaaacagtaaatgaagagcttcaaagcattttcgacgattgtcatgtcagattaatagatttcaagcttgaattcggtttagatgcagaagggcaagtgcttttggcggatgaaatttctcctgacacatgccgcttgtgggataaagacacgaacgaaaagctggataaagatttattcagacgcaatctgggaagcttaaccgacgcatacgaagagattttcaaaagactgggaggcattcatcatgtataaagtaaaagtttatgtcagcttaaaagaaagtgtactagatccacaagggagcgctgtccagcatgccttgcacagtatgacttacaacgaagttcaagatgtgcgcatcgggaaatacatggagcttaccattgaaaaatctgaccgtgatcttgacgtgctagtgaaagaaatgtgcgaaaaacttcttgcgaacacagtgattgaagattacagatatgaggttgaggaggtagtcgcacagtgaaatttgcggtgattgtgttacccggctccaactgtgatatcgatatgtatcatgctgtaaaggatgagctcggccatgaagtggaatacgtctggcatgaggaaacaagtcttgacggcttcgacggtgtgttaattccgggagggttttcttacggcgattacttaagatgcggcgccatcgcccgatttgcgaatattatgccagctgtcaaacaagcagcggctgaaggaaaacctgttcttggcgtctgcaacggattccagattttacaggagcttgggctgctgccaggcgcaatgagacgcaacaaagatctgaagttcatttgtcgtccggttgaattaattgttcagaacgacgaaacattattcacagcttcctacgaaaagggagaatcgattacaatcccggttgcccacggtgaaggaaatttctattgtgatgacgagacgcttgcttcattaaaggaaaacaatcaaattgctttcacatacggctctaatattaatggaagtgtcagcgacattgccggtgtcgtgaatgagaaaggcaatgtattaggcatgatgcctcaccctgagcgcgcggtcgatgaactgcttggaagcgccgacggtcttaaattgttccagtctatcgtgaaaaattggagggaaactcatgtcactactgcttgaaccaagtaaagaacaaataaaagaagagaaactgtatcagcaaatgggtgtcagtgatgatgagtttgcattgatagaatccattcttggaagattgccgaactacacagaaatcggaattttttctgtcatgtggtctgagcattgcagctataaaaactcaaagccgattctgcgtaaattcccgacaagcggcgagcgtgtgctgcaggggccgggggaaggcgccggaatcgttgatatcggtgataaccaagcggttgtgttcaaaattgaatcacataaccacccatcagctctcgagccttaccaaggcgctgcgactggcgtaggcggaattatccgtgacgtattttcaatgggtgcccgtccaatcgctgtattgaactctcttcgatttggtgaactgacttcaccccgcgtgaagtacttgtttgaagaagtagtagcgggtatcgccggatacggcaactgtatcggcatcccgacagtcggcggagaggtacaatttgacagcagctatgaaggaaatccgcttgtcaatgccatgtgcgtcggtttaatcaatcatgaagacatcaaaaaaggccaggcgaagggtgtcggcaataccgtaatgtacgtaggagcgaaaaccgggcgtgacggaatccacggcgctacgtttgcttctgaagagatgtcagactcatctgaagaaaagcgttctgctgtccaagtcggcgatccgtttatggagaagcttttgcttgaagcgtgtctggaagtcatccaatgcgacgccttagtcggcattcaggatatgggagctgccggtttaacaagctcaagtgcagaaatggcaagtaaagccggttctggtattgaaatgaaccttgacctgattcctcagcgcgaaacaggcatgagcgcgtatgaaatgatgctttctgaatcacaggaacggatgcttttggttattgagcgcggacgtgagcaggaaatcatcgatatttttgacaagtacgatcttgaagcggtttctgtcggacgtgtgacagatgataaaatgcttcgcctgacacacaaaggagaggttgtgtgcgagctgcctgttgatgccttggcagaagaagcaccggtttaccataagccttctcaagagcctgcttactatcgcgagtttttggaaacggacgttccggctccgcaaattgaagatgcgaatgaaacgctgaaggcccttcttcagcagccgacgatcgcgagtaaagagtgggtgtatgatcagtatgactacatggtgcgcacgaatacagttgtcgctcctgggtctgatgctggtgttctcagaatccgcggaacgaaaaaggcgctggcgatgacgacagactgtaacgcgcgttatctctatcttgatcctgaagtcggagggaaaattgctgtcgctgaagcagcgcgcaacatcatttgctcaggcgcagaaccgcttgcggtcacagataaccttaacttcggaaacccggagaagccggaaatcttctggcagatcgaaaaagcggcagacggcataagcgaagcgtgcaatgttctcagcacaccggttatcggcggtaacgtatcgctttataacgaatcaaacggcacggcgatctatccgacaccagttatcggcatggtcggcctaattgaagatacagcgcacattacaacacagcatttcaaacaagcaggagatctcgtatacgtgatcggcgaaacaaaaccagagtttgcgggaagcgagctgcaaaaaatgacagaaggccgtatttacggcaaagcgccgcaaatcgatcttgatgtagagctgtctcgtcaaaaagcactgcttgacgcgattaaaaaaggcttcgttcaatctgcgcatgatgtgtctgaaggcggcttaggcgtagcgattgcggaaagtgtcatgacgacggaaaaccttggcgctaatgtgactgtagaagggggagcggcattattattctctgaatctcaatcccgcttcgtcgtttcagtgaaaaaagaacaccaagaagcgtttgaagcaactgtcaaagatgcggttcatattggtgaggtaacagctgacggaattctggcgattcaaaaccaagacggacaacaaatgattcatgcgcaaacgaaagagcttgaacgcgtatggaaaggagctatcccatgcttgctgaaatcaaaggcttaaatgaagaatgcggcgtttttgggatttggggacatgaagaagccccgcagatcacgtattacggtctccacagccttcagcaccgaggacaggagggtgctggcatcgtagcgactgacggtgaaaagctgacggctcacaaaggccaagggctgatcactgaagtatttcaaaacggcgaactcagcaaagtaaagggaaaaggcgctatcgggcacgttcggtacgcaacggctggaggcggcggatacgaaaatgttcagccgctcctcttccgttcccaaaacaacggcagcctggcgcttgctcataacggaaatcttgtcaatgccactcagctgaagcagcagcttgaaaatcaagggagcatctttcaaacctcttcggatacagaggttttggctcacctgatcaaaagaagcggacacttcacgctgaaggatcaaattaaaaactcgctttctatgctgaaaggcgcctacgcgttcctgatcatgaccgaaacagaaatgattgtcgcacttgatccaaacgggctgagaccgctatccatcggcatgatgggcgacgcttatgtggtcgcatcagaaacatgcgcatttgacgtcgtcggcgcaacgtaccttcgcgaggtagagccgggagaaatgctgatcattaatgatgaaggcatgaaatcagagcgtttttccatgaatatcaaccgttccatttgcagcatggagtacatttatttctccagaccagacagcaatattgacggtattaacgtacacagtgcccgtaaaaaccttggaaaaatgctggctcaggaatccgcagttgaagctgacgtcgtaaccggggttccggattccagtatttcagcggcgatcggctatgcagaggcaacaggcattccgtatgagctcggtttaatcaaaaaccgctatgtcggcagaacgtttattcagccgtcccaggctctgcgtgagcaaggcgtcagaatgaagctgtctgcggtgcgcggggttgtagaaggcaaacgcgtcgtgatggtggatgactctatcgtacgcggaacaactagccgccggattgtcacgatgcttagagaagcgggtgcgacagaggtgcatgtgaaaatcagttcaccgccgatcgctcatccgtgcttttacggcattgatacttccacacatgaagaattaatcgcgtcttcgcattctgttgaagaaatccgtcaggaaatcggagccgataccctctcatttttgagtgtggaagggctgctgaaaggcatcggcagaaaatacgatgactcgaattgcggacagtgtctcgcttgctttacaggaaaatatccgactgaaatttaccaggatacagtgcttcctcacgtaaaagaagcagtattaaccaaataaaacttgaaaaatgacataaaggcagcgcagttcggctgcctttctctttctgccctcattcggggagatattttgaaaagcgccttaaaggagtgaataggatgtctgaagcatataaaaacgcaggagttgacatcgaagccggatatgaagctgtaaaacgaatgaaaaaacacgtggagcgcacgaaacggcttggcgttatgggcagccttggcggttttggcggcatgtttgacctgtctgagctttcttatcaaaaaccagttctcatttcgggaacggacggtgtcggcacaaaattaaagctcgctttttccatggataagcatgacacgattggcgtggacgctgttgcaatgtgtgtcaatgacgtgctggcacaaggtgcagagccgctgtttttcctcgattatttagcggttggcaaagcggacccagtgaaaattgaacagattgtacaaggtgttgcggaaggctgtgagcagtcaggttcagccttagtcggcggtgaaacggctgaaatgccggggctctatacagctgatgaatacgatattgccggtttctcagtcggagtggcagaaaaggacgaaatcgtgactggagaaaacattgaagagggccatctgttgatcggtctcagctccagcggccttcacagcaacggcttttcccttgtcagaaaagtgcttctggatgatgcggagctggacctcgatacaacatatgagccgtttgaacgcccgcttggcgaggaattgcttgaaccgacaaggatttacgtgaagcctgtgcttgccgcggtcaaaagcggaaaaatcgacggcatggcgcacgtgacaggcggaggatttattgaaaatattccgcgtatgcttccggaaggcttaagtgcggaaattgatcatggctcatggccgatcccgccaattttttctttcttgcaagagtacggcaagctaaaggaagaagacatgttcaacgtctttaatatgggtatcggttttgttttggcagtcaaagaagagcatctgacagatgtgatcggaacgcttgaaagccatggcgaaaaagcctatttaattgggcgtgtgaaaaaaggtgaaggcgtcacattcggcggtgcggcactttcatgaaaaagtttgcggtatttgcatcaggaaacggttcaaacttcgaagccatcgtcacgcgtttgaaggaggagaactgggatgcgtcagcagcgctcctcgtttgcgacaaaccgcaggcgaaagtcatcgaacgggcggaagcattccacattccatccttcgcatttgagccgaagtcttatgaaaacaaggctgcatttgaacaagccatcattgaacagcttcgtcttcacgaggttgaattgattgttcttgccggctatatgaggctgatcggtgatacgctccttcaagcatatggaggaaaaatcattaacattcacccgtcgcttcttccggcgtttcctggaatcgacgcagtcggacaggcgttccgggcgggtgtaaaggtggccggaatcaccgtgcattatgtcgatgaaggaatggatacaggtccgatcatcgctcaaaaggctatcgaaattgatgagcatgatacattggaaacaatcgaacagcggattcacaagcttgagcataaatggtatccgagtgtgattaaacagctattaggattaaataacagaggtgaaaaggcatgaccattaaacgtgcattaatcagtgtttcagataaaacaaatctcgttcctttcgtaaaagaactgacagagcttggcgttgaagtcatctccacaggcggaacgaaaaagcttcttcaagaaaacggtgtggatgtgatcggaatttctgaagtgacaggctttcctgaaattatggacggccggttaaaaaccctacacccgaatattcacggcggccttctggcggttcgcggcaatgaagagcatatggcgcagatcaatgaacacgggattcagccgattgacctcgttgtcgtcaacctctatccatttaaagaaacgatttctaaggaagacgtcacatatgaagaagcgatcgaaaatatcgacatcggcggacctggcatgctgcgtgcggcatcaaagaaccatcaggatgtcacggttatcgtcgatccggccgattacagcccagtgctgaatcaaatcaaagaagaaggcagcgtatctcttcagaaaaaacgcgagctcgcggcaaaggtattccgtcatactgcggcatatgatgcactgatcgctgactatctgacaaatgttgtcggtgaaaaagaaccagagcaattcactgtgacatttgagaaaaaacaatcgcttcgctatggagaaaacccgcatcaggaagcaactttctatcaaacagctcttcctgtcaaaggctccattgcgcaagcagaacagcttcacggaaaagagctttcttacaacaacattaaagacgcggatgctgcagttcaaatcgttcgtgaattcactgaaccggctgctgttgctgtgaagcatatgaacccgtgcggcgtgggaacaggaaaaacgatcgcagaagcgtttgacagagcgtttgaagcggataaaacatctatcttcggcggcattatcgcgctgaaccgtgaagtggacaaggcaactgccgaagcgcttcacaacattttcttagaaatcatcattgcgccttcattcagccaagaagcgctcgacgtcctgactgcgaagaaaaatctccgtctgctgacgcttgacgtatccgccgctgttcaaaaggaaaaacagctgacatccgttcaaggcgggctgctgattcaagatttagatatgcacggcttcgatgatgctgagattagcattccgacaaaaagagagccgaacgagcaagagtgggaagacttgaagcttgcttggaaagtcgtgaagcatgtgaaatcaaatgcgattgttctcgcgaaggacaacatgacagtcggcgtgggagcaggccaaatgaaccgcgtcggatcggcaaaaatcgcaatcgagcaagcaggggaaaaagcgaagggcagcgcgctcggttcggatgcatatttcccaatgccagatactgtcgaagaagcggcaaaagcgggcgttacagccatcattcagccaggcggatcgatccgagatgaggattccatcaaaaaagcggatgaatacggcattgccatggtattcaccggcatcagacacttcaaacattaaggggatgaaaacgacgtgaatgtattaattatcggtaaaggcggaagagaacatacgctggcgtggaaggcagcgcaaagcagcctcgtcgagaatgtatttgcagctcctggaaatgacggcatggaagcttccgcacagcttgtaaacattgaggaaagcgaccacgcagggcttgtctcgtttgcaaaagaaaaccaggtcggcctaaccattgtcggccctgaggttcctttgattgaaggtctggtggatgaatttgaaaaagcgggtctgcgcgtgttcggcccgtcaaaagccgcggcgatcatcgaaggaagcaaacagttcgctaaggatttaatgaagaaatacgacattccgaccgcagaatacgacacgtttacatcctttgatgaggcgaaggcatatgtgcaggaaaaaggtgctccgattgtgataaaagcagatggacttgcagctggaaaaggcgttactgtggctatgacagaggaagaagcaattgcatgtctgcatgactttcttgaagatgaaaagttcggtgatgcgagcgcgtccgttgtcattgaagaatatctttctggtgaagaattttctctgatggcctttgtcaaaggggaaaaggtgtatccgatggtgattgcccaggatcacaagcgtgcgtttgacggagacaaaggtccgaatacaggcggaatgggcgcttactctccagttccgcaaatttcggaagaaacggttcgccatgctgtagaaaccatcgtgaagccggccgcaaaagcaatggtacaagaaggccgttccttcactggcgttttgtacgctggattgatgcttactgaaaacggctcgaaggtcattgaatttaatgcccgtttcggcgatccggaaacacaggtcgtgcttccgcgcatggaatctgatctggtacaggtgcttcttgatcttttagatgataaggaagttgacttaagatggaaggataccgcggcagtgagtgttgtgcttgcatcagaagggtatccggaaagctatgcaaaaggcacgccgatcggcagccttgcagcagaaactgagcaggtcgtggtcttccatgccggaacgaaagcagaagatggagagttcgttacaaacggggggcgcgtcgccaatgtgacggcttttgatgaaacgtttgaagcggctagagaccgagtgtacaaagcggttgatgaaatattcaaaccgggactctttttcagaaaagacattggggcacgcgctttaaaggctgcccaaaaataagtgaggaaaacccgcagaatagctgcgggttttttgttatcaaaaagcgggatggcagctggaagaagaaaggacaacgagcgtggttggttttccatgggccatcgaggcgtcaataaaatcctcaagcgtatgtaccgattcagtcacgacctttgtcacatagctgtacatccctgtgatgcggtggttttctgctacatcagggtgcgcttttgcaaaggcggcgtagtgcttgcagcttttcggctccatgagaatgaaagcggtgacatgcttgtttagtttttcataacagatattcgcgctgtacccggtaatcactcctttgtcttcaagcttcctgacacgctccgccgcgcttggcgaactgagtccgacaagctttcccagctcaaccatcgttaatctgccgtttcgctgcaaatgcgagagaatctgaaggtctgtatcgtccatttgtccggctcctttacatatttaggcgaatgaatgaaaattcctttgatcgtaaggtaatgctgttgatttaacttcattgtagcatatggatgccgtcttattttttctataataaagccatcaatcagagaggaggcatcatgttgccagaattacagcgctctattacttggatacaagggacggcgttaacgattggggcggttttaggatgcgggatattaatcctgccgtctgtcactgcggatacggccggtccggcttctttatttgtctgggtattcatgtcttttttatcttttcttctcgtcggcacgctggcacggcttgtgaaaattgcgcccagcgcgggaggaatcactgcttatgtgcagctggcctttcagaaaaaagccggggctattttgggctggatcatgttaggttccgttccgattggcgttcccatcatcgctttgactggcgcgcattacgtcagttacatcacagaggcggccgattggcagattacattgattgctggttgcatgctggctatatctattttgcttcatatgagaggcattcaactatcagcaaacatcagtacaatcgttatttgtgtcatcgtatttctgcttgtcacttctattgctgtgtcattgccacacgtcacgatagcagaattcaagccgtttcttccgcatggctggtctgccgctggatctgtttcagttatgatttttttctcttttgtaggctgggaaatgattaccccgttggctgaggaatttcatcgccctgaaaaagatgtcccgctcagcttgtttttggcagcgtcttgtgtggcagggctgtatatcatgctgtcatttgtgacggtggggactcattcatatggagagaatggagaaattgcatcgcttgccatgctcatttcaaaaggagcaggggaaagcggtgtatacgtcacggtatgtttagcgctgtttattacattcgctaccatccatgccaatattgctggtttttcaagaatggtgtacgcattggcgagagaggggcacatacccgtattttttggaaaactcagtgcgacaaaacgtacgcctatccgtgttttgacagcgatggccgcagtgtttggcttagtgcttgcggcgcatggtctgtttcaaatcgatttgacgactctgttgaaagggccgagcgcggcttttatcgcatcttacatatgtacaatggcggcagcactgaaactgctgggcaggagagatataggctggtggatggcgctcggggcatttgcggcgtgcgcggtgatttattcattcagcggctgggcactgctttatccggcagtgctggcagctgcaggatatttctatatgaaaacaaaggatgggcataaaaaaaagcttgatcacgttttgtgattaagcttttccatttatccgttttgatgctcgttatttccagaatcactgtgttgaaacatgtaggtcacaggacagaagcgcaagattcccgaacccgctttcatggcccccataaagatgtaaaagagatgcattctgcaccaaggttttttcgtaaactttgcactggcggctgacataatcgtcaatccgcaggcgattctgaacacggcattgatgagactgatgtttggcttcaaggaaatccgctccttttacttaaaaaagttttttaaccgaaccttcaaaaatttgtaacgtttttatcgtgcgtgatgaggaaggatgtgataccatgagtctaatacatgtaaaggagagtatgtgaatgtccgaacgcacctttaactggaaaaacaaagacatcagggcacaggttgatgttgtagactcaaagctgcttccaacgctccttttacggaatgctctcgtcttaaatccatatgtaaaacaatggctgaaaaaaaacatttggatttatcaggaccgcattgtttatgtgggtcatgaacttccgaatagagccgaagaaattcatacgattgattgtgaaggaaaatacattgtgccaggttatattgaaccgcacgcacatccttttcaaatatataatccccaaacactggcggaatatgtgtctcaatacggaacaacaacattcgtgaatgataacttatttttgcttttgcaaagcggaaaaaagaaagcgcttacgattttgaatgaactcaaaaagcagcctgtccagtatttttggtggtcacgctatgacctccagaccgaggttctgaacgaggaccacgtccttccatttgacgtcagaaaacagtggattgaacatccggatgtgattcaaggcggagaaatgaccggatggcctcgcctggtagatggtgatgatttaatgctccactgcatgcaagctacaaagaaacagagaaaacgcattgaagggcattttcccggcgcttctgataaaacgcttacaaaaatgaagctgttcggtgcagattgtgatcatgaagcgatgtcaggtgatgaagtgatgagaaggctggaactgggctattatgtttcccttcggaactcttccattcgccctgatgtaagaaaaatcttgcaagagctgcatgagaagggcttccgctattatgaccacttcttttacacgacagatggcgcaaccccgaatttctataaaggcggcatgacaaacgagctgattcgcatcgcgttagaagaaggcgtacctgcaatcgacgcctacaatatggcatcatttaatatcgcaaagtattaccaaatggatgattatttaggagttgtcggaccgggtagactggcatcgctcaacatactggaagatccgttaaatccgaatcccgtgactgttctgtcaaaagggactattctgcgtgaagacggctgtgatttgaaggcgtttacaaaggcggactggcacaaaggtggtcttgtcccgcttgagctttcatatgatatgacgatggatgacttgcagttttctatgccgatgggcgtgaaaatgcggaatgcggttattatggagccgtatatgattgagattgacaattcgatggaacagctctcgtttgaccatgatgaaagttatttgacgatgctcgacagacacgggaaatggcgcgtcaatacgatgataaaagggtttgcctcaagcgtgcagggatttgtaagctcctttacgacgacgggcgacattgtcgcgattggaaaaaataaagcggatatgctgctcgctttcgcccggatgaaagaaatcggaggaggaattgttttagcggagaacggaaacattttgcatgaaatcccgcttgccctgtgcggctgcgcctcttcggaagcgtatgaagaagtgcttgagaaggaacaaaagctgagagatcttttgactgaaagaggctatgagttttgcgatcctatctatacgctgctctttttgcaaagtacgcaccttccgtatatacgcattacgccaagaggaatcttcgacgtcatgaaaaaaactgtactctttccatcgataatgcgttaaaatataaaagagcagggagccgacatatgaaaaaatggatgacagtttgcgcgctgtgtttcgtgttttttctgctggtatcctgccagcagaaggatgctgtcccggatactgcaaagaagctgaaagctcctttaacggggctaaagactgaacagaaagtgactgaacgccgccctgttgctgttgtggtgaacaatcacccgaaggcgaggccgcagtcgggtctgtctaaagccgacattgtcatagaagcgctagccgaagggcaaatcacaagatttctggccattttccaaagccagatgcctgaaactgtcggacctgtgcggagcgcgcgggaatatttcgtcactctcagcaatggctttgacagcatatttgtccatcacggctggagtcccggcgccaaaaagcagctggaatccggagctgccgattatatgaacggattggattttgacggaagcttattttggagagctgatttcagcaaaccgccccacaattcctatacgtcttatgattacataaaaaaggcggcagaacaaaagggttataagctgaagcaggaaacaaatccgctgctgtttcaaacatcagatgcaaaacctgcaaatgaatcttacaatgttcgggtagattatggaacaaaaaacgttacaaatcttgtcgaatacaactatgataaaaaagctgaatcttatacaagaagctctgatggtgtcataacgacagaccgggaaaccggaaagccggttgcaatgcaaaatattttcattgttgaagccagccatcatattattgatcaagatggaaggcgggacatcgacttggtatcaggaggaaaaggtctgttgtttcagcacggaaacgtcattgaaacagactggaaacaagtgaatggcagaattgtgccgataaaagacggcaagtggcttccgtttgtgccaggaaagacttggatcaatatcgtacctgatcttgatgcggcttccattagtaaaggagaaggtgtgtaacgatgcaaatcgataaattacgcggcaaagagctggaccagttatttaactcgatcttatcgctgaaagacctggaggaatgttaccgattcttcgatgatctatgcacaattaacgaaattcaatcgctggctcagcgccttgaagtggcgcgcatgcttcgcgaaggaaacacgtatcataagattgaaacagaaacaggcgcttccacggctacgatttcccgtgtgaaacgctgcttaaattacgggaatgacgcttatgaaatggcgcttgaccgtgtgaaggagacggaaactgagtcttcttcaaaataataaacaaccgccctgccgttcggcaagggcggtttctttatgaaacaaattgatggatcaggttgtcgatatcgatgatactgccatcctctttccgatagacaacatgctccttggaaaagtgaatcggcgaattgatccctgctgcggctgcaaggttaaatagtccctcgcgcaatgaaataacgtagttgcagacacgatgctgtttttcctcaacgctcagtgctttttgcaatttcggatctgtcgtcgccacacctgccggacatttgttggtgtggcagacgagagcgcggatgcagccaacggaaaacatcatgccgcgtgcgatgttgacaaagtcagcgccgagggctaaggcgaccgcgattttatcaggagtcaggagctttccggaagcaaagattttcagctggctgcgcaagccgtactgtttaagaagcgtgtcaacaataggcagcgctgtcataatcggaaggccgactgtatccgcgagctcgtaaaaggaagctccggtaccgccttcacttccatcgatcgtgataaaatccggatgttttccgcttttctgcatatgagagaaaagctcatgcaattcttcaggatgccctgcgaccagtttgatgccgactggcttttgtccgacatctctaagtttttcaataaagtcgagcatttcaggagggtttgagaattcataaaagcggttcgggctgtcaatcgactttccaggttcgacattccgaatgtctgccacttcctctgatactttggcgccatccacatggccgccccgggttttcgctccttgtgccagctttagctcaaacgctttaatctggtcaatcctgctttttcttttaaattcctcccacgaaaattccccgtttcttttgcgcacgccgaataggcccggtccgatttggcaaatgatatcggcgccgccctttaagtgatattcagacaatcccccttcacctgtattcatccaggtgccgcctgcctgatggagcccttttgagagcgccgtaacagcccgttctccaagagaaccgtagctcatggcagactggccgactaagcccttcacataaaatggcttctcgcatgtacgctcgccaatcacctgtacatcatcaggatggagaaaatacgggtctgccttgatatgttcggcatgctccttgcgtttgaacagattgtcagcatccattttatagatttgggtttcaattttgggcgtttgatttacgtgcatttcttccctttgttttggaaacatagcgttacggatataatagccaggtttatcaaaatctcttacagatccaaagcccatcattctgcttttgtatttgccggagatgacggtttgctcatattcctttcgtgaaaaaggctgctcctcattgtcattgctgtataaatactgtctgagctccggcccgattttttcaaggatataccgaaaccttccgatgacgggatagttgcgaagaattgagtgctcctgctgtttttcatcctttatgtagatccaggcaaacaagacgatcgggatagcgatgatccctatgataaatgcgatgagtgctattatgatggtttccatctctcagcctccctttttatgtaaccatttccacagttgaacactttccaaacaatagcagaaggaatctggtgaaaaatgtgtgcttctgccgatacaggactcagagagcaggtactgccatatgctctttttttatgaaaatagaatcaaaacacctttttcagtgaataacgagattaacggctttttccgtttttccgcgctatgtgaatttgttataatgtttaaatggtaacaaacgaatggaggaacgtatgacgtgtacgatgtaacggagtggaagcatgtctttaaactcgatccaaataaagatttgcctgacgaacagctggagattctttgcgaatcaggaacggatgcggtcattatcggaggcagtgatggtgtaacagaggataatgtcctgcggatgatgtctaaggtaagacggtttttggtgccgtgtgtccttgaggtatcagcgattgaagcgatcgttcccggctttgacttatattttattccgagtgtattaaacagcaaaaacgcggattggattgtcggaatgcaccagaaagccatgaaggaatacggagaactgatgtctatggaagaaatcgtggcggagggctactgcatcgcaaatccagattgcaaagccgcggcactgactgaagcggacgccgatctgaatatggatgatattgtcgcctatgcgcgtgtgtcggagctgctgcaactgccgattttttatttagaatacagcggcatgcttggagacatagaagctgtcaagaaaacgaaggctgtattggaaacgtcaaccttgttttatgggggcggcatcaaggatgcggaaacggccaagcagtacgcagagcatgcggacgtgatcgttgtaggcaatgctgtgtatgaagattttgacagggctttgaaaacagtagcggctgtgaaaggcgagtagtaaattgtacggatttggtttatgatagaacatatgttttgtataggcgggtgaacaaattttgaattatattagcaatcaattactaagcggtttaaaccccgttcagcaggaagcagtcaaaacaacggacgggcctcttttgctgatggcgggagcgggaagcggaaagacgcgtgtcctgacccatagaattgcttatttaatggcggaaaagcatgtggcgccgtggaacattctggcgatcacatttacaaataaagcggcacgcgaaatgaaagaacgtgtggaaagcatcctcggacccggcgcggacgatatctggatttccacattccacagcatgtgcgtgcggatcttgcgcagagatatcgaccggattgggatcaaccgaaatttctccatccttgatacggctgaccagctttcagtgatcaaggggattttgaaggagcgcaatcttgatccgaagaagtttgacccgagaagcatcctcggtacgatcagcagtgcgaaaaacgaattgaccgaaccggaggaattctctaaagttgctggcggctactacgatcaggtggtcagcgatgtatatgctgattatcagaagaagctattgaaaaaccagtcgctcgatttcgacgatttgattatgacgacgattaaactgtttgaccgagtgccggaagtacttgaattttatcagcgcaaattccaatacatccatgttgatgagtatcaggatacgaacagggcgcaatacatgcttgttaagcagcttgccgagcgtttccagaacctttgcgttgtgggggattctgatcagtcaatctacagatggcgcggcgcggatatcaccaacatcctttcatttgaaaaagattatccgaatgcaagcgtgattttgctagaacaaaactatcgttcaacgaaacggattttgcgcgcggcaaacgaggtcattaaaaacaactctaaccgcaaaccgaaaaatttgtggacggaaaacgatgaaggcatcaaaatttcctattatcgcggtgataatgaattcggagaaggacagtttgtggccggcaaaattcatcagcttcacagctcaggcaagcggaaactgtctgatatcgccatattataccggacaaacgcgcagtcccgtgtgattgaggaaacgcttctcaaagcgggcttgaactataacattgtcggcggcacaaagttctatgacagaaaagaaattaaagacattcttgcgtacctgcgcctcgtatccaatccggatgacgatatcagtttcacgcgcattgtcaatgtgccgaagcgcggagtcggcgcgacatcacttgaaaaaatcgcttcgtatgcggccataaacggcttgtcatttttccaagcgattcagcaggttgattttatcggcgtcagtgccaaagcggcaaacgcgcttgacagctttagacagatgattgaaaacctgaccaatatgcaggattacttatccattacagagctgacagaagaaattcttgataagacggaatacagagaaatgctgaaggctgagaaatcgatcgaagcccaaagccgtttagaaaatatcgacgagttcctgtctgttacgaaaaactttgaacagaaaagtgaagacaagacactcgttgcgttcctgacagacttggcgttgatcgcagatattgatcagctcgatcagcaggaggaagagtcaggcggcaaggatgcgatcaccctgatgacactgcacgccgcgaaaggactggagtttccggttgttttcttgatggggcttgaagaaggcgtcttcccgcatagccgttcactcatggaggaagcggaaatggaagaagaacgccgccttgcgtacgttgggattacaagggcggaacaggagctttatctgaccaatgctaaaatgcgcaccttgtttggccggacaaatatgaacccggaatctcgcttcattgctgaaataccggatgatttattggaaaacctaaatgagaaaaaagaaacgagagcgacgtctgcgagaaaaatgcagccgagacgcggccctgtttcacgcccggtatcctacgccagcaaaacaggcggcgacaccttaaactgggcagtcggagataaggcgggccataaaaaatggggaacaggaactgtcgtcagcgtgaaaggcgaaggagaagggacggagctcgatattgcctttccgagccctgtcggcgtgaaacgcctgttagcagcatttgctcctattgaaaagcagtaattgaagaggaaaggaagaagcagatggacaaagaaacagcgaagcagcgggcagaagaactgcgccgcaccatcaacaagtatagctatgaatattacaccttagatgaaccgagcgtcccagatgccgaatacgacagattgatgcaggagctgattgcgatcgaggaggagcacccagacctcagaacgcctgactctcctacgcagcgcgtcggcggagccgtgcttgaagcgtttcaaaaagtcacccacggcacaccgatgctcagtctgggcaacgcctttaatgctgatgatcttcgtgatttcgaccgccgtgtgcgccaagccgtcggcgacgatgtggcgtataatgtggagctgaaaatagacggtcttgctgtttctctccgttatgaagacggctattttgtcagaggggccacaagaggtgacggaacgactggagaggatattacggagaacctgaagacgatccgcaatatcccccttaaaatgaaccgtgagctgtcaatcgaagtgcgcggagaggcgtatatgccgaaacgttcgtttgaagcactcaatgaggaacggattaaaaatgaggaagaaccgttcgccaatccgcgaaatgccgcggcgggatctctcaggcagctcgatccgaaaattgcagcgaaacgaaacctcgatatcttcgtctacagtatagcggagcttgacgagatgggtgtggagacgcaaagccaagggcttgattttctcgacgaactcggatttaaaacgaatcaggaacgaaaaaaatgcggcagcatagaagaagtcatagtgctgatcgatgagtttcaggcgaagcgcgcagacctgccgtatgaaatagacggcattgtcattaaagtcgattctctcgatcagcaggaggagctcggttttacggcgaaaagcccgcgctgggccatcgcgtataagtttcctgctgaagaggtcgtgacgaagcttctcgatatcgaattaaatgtcggcagaacgggtgtgatcacgccgaccgcgattcttgagccggtaaaagttgccggcacaacggtctcaagagcatcccttcataacgaagatttaattaaagagaaggacattcggattttggataaggttgtcgtcaaaaaagcgggcgatatcatcccggaagttgtgaatgtcctcgttgaacagcgaacaggagaagaaaaggaattcagcatgccgacggaatgtcctgaatgcggcagtgagctcgtccggatcgaaggagaagtggcgcttcgctgcattaaccctgaatgtccggcgcaaatccgggaagggctgatccatttcgtttcccgcaatgccatgaacattgacgggctcggcgaacgagtgatcacacagctgtttgaggaaaaccttgtccgcaatgtggcagatttatataagctgacgaaggaacgagtcatccagctcgagcgcatgggtgaaaagtccactgaaaacctgatcagctccatccaaaaatcaaaagaaaattcgttagagcgtttgctgtttgggcttggtatccgttttatcggatcaaaggctgcaaagacgcttgccatgcattttgaaagcttggagaacctgaaaaaagcctcaaaagaggaacttctcgcggtagatgaaatcggtgaaaaaatggctgacgcggtcatcacctattttcataaagaagaaatgcttgaactcttgaatgaacttcaggagctgggcgtaaacacgctctacaaaggcccgaaaaaagtaaaagcagaggacagcgactcttactttgccggtaaaacaattgttctgacaggaaagctggaagagctgtcaagaaacgaagccaaagcgcaaatcgaagcgctgggcggaaagctgactggaagcgtcagcaaaaacacagacttagtcatcgccggagaagcggcgggaagcaagctgacaaaagcacaagagctgaacattgaagtgtggaatgaagaacagttaatgggagagctaaagaaataagaggagtgttttctattgaaaaagacgttggcattggcggcaacggcggcagtattaatgctgtctgcctgctcgtcaggttttgggggggagaaggaggaagagattacgcaaaagacggcgaaatcgtcagaaaaagcgattgtcccgaaatataatatctctgactcctattacaaaatggtgctgccgtttaaggcaggcaaagcgcgcggcttaacaacggaacagctgaacactaggctggacattgacgagtttgaaacagggctgatgcgtcttgcccaagattctttctcgactgacgattatctgttccaagaaggacaatatttagatgaggatacagtattaagctggctggcacggaaaaaaacgggctctgatttgaaaaaagccgaaaaagaagataaaaacttcaaaaatgaaggcttgaacccggcgctcccgagttctggttcaacagaagaaaagaacgaaagcagcccgatttatttagcatccatgcttgagcacgattatttagtcagaaaagacaagaattctatccagcttggcggcgtcatgatcggactggcgttaaactcagtgtattactatcgtgaaaaaactggcgacccgcaaaaagaagtggagattaaagacagcacgcttcgccagcagggagaaaaaattgcacaggaggttattaaccgcctccgcaaaaaagataacttgaagaatgtgccgattaccgtcgcgctctacaagcaggcgtcaaaaacatcgattgtgccggggaacttcatcgccaaaacagaggtcaaagcaggctctactgatatctcaaattgggatgacatcaatgaaaaatatgtattctatccggcagatacaaccacagcagaaaaatacccggatgacaccgaggtctttaagcggttcaaaaactcaattgaagaatatttcccgaactatacaggcgttgtcggtacagcgctgtatgaaaatgatgaaatgaagaaaatgaagattgacataccaatgcaattctacggaaaaagtgaagttgtcgcgtttacccagttcttaacgggtgaagtgatggactactactctaagagctcagttgatgtcgaagtcaatatcacgtcctcagacggacaggaagcggtcattatccgcaatgccggagataaagagccgactgttcacatttatgactgatagaaaacccttgtgccatattggcacaaggggttttatgttacaattaacaggaaaagggaaaatatttccgcttctgccgaaacacaaatcaaggggaggtatgttgatgctggaaatcgtgtgaaaacaatcattatcaaatctatagcaatgaaaggatgttagacatgcataaagatatcaaaaaaatatttgaggaagagcaggttttggcagaagctgcagcgagatacggtttctcaaaagatcaggtgcgttttctggctgatgcggaaaactatgtatatgaatgtatgaaagacaatcaaccttatattttaaagattacccatacgattcggagatcttctgattatataatgggagagatggaatggctccgtcaccttgcaataggaggaatttcagtagccaaaccgctcccgtcgctgaacggaaaagatgtagaagcagtgccggacggaaacggcgggtcatttttattgagagtgtatgagaaagcgccggggcaaaaagtggatgaatcggactggaatgaaacgctattttatgagcttggcagatacacaggcagcatgcacagcttgacaaaaagctacaaattgagcaatcccgctttcaaaagacaggaatgggatgaagaggagcaattaaagctgagaaaatatgtacctgaagatcagataaaggtgtttcagcaagccgattatttgatgaatgaactgcggaggctcccgaaaagccaggacagctacggcttggtgcatgcggatctgcaccatggcaattttaactgggatcatggcaaaatcacggcatttgattttgatgatatcggctacaactggtttgttaacgatattagcattcttctctacaatgtcctgtggtatcctgttgtgccatatgatgataaagctgcgtttacagaagaatttatgacgcattttatgaaagggtactgggaggaaaatgagcttgaccctacatggctgatgataatacctgatttcctccgccttcgccatatgctgatttacggattgctgcatcagatgtttgaccttaacacaataggagaagaggaaaaagaaatgctggccggtttcagaagagatatagagaatggcacgccgattacagcatttgatttttcagcactggtgtagatagaaaaagccaatgggattccagtcccattggcttttataatgtatcacacttcacgccgactacgccttcaatggctttaatgtcatagtagacatcggtcgtgtatctgtttttatggacgcggaccttcacttccataattggaaaatccttttcgcctaggtcgtcgatccgaacggagtgtgctttgatatctcttcttttcatttcttttaaaatctctgtcattttgtctttatcagaaagtgacattctgatgcggatgtctttttcctgcaggcggtcggggccgatttttctgaccacccatgggagaaattccacgctgatcaggatgaacagaagactggcaaacgcttctttataaaaaccggctcccgtagccagcccgagccccgctgccccccagatcatggccgatgtcgtcaggccggaaatgacatcattgctttttcgcaggatgacaccggctccgataaacccgacgccggagatgatttgtgccggcagacgaagcggatccatcatgatgcggtagtatttagggaaatgatatgccgcattaatactgacgatcgtcagcatgcatgagctgactgcgatgacgatacaggtttttaatccgagcggcttattttttaattcgcgttcaagcccgatgaccatgccaatcaatgtggcaatgcccaatttcaataaaatatcaggatcaatataccagctcaacagcaacttcccccttctctaaggtgtttttaaataaatatgattttctcacagtatttatagcaaaacaagggtacaaaagccaccaagctgcgcttgatggcttattgcttactttttgcgttttaacagcttttccatgacaccgaataatcggtaagaggcttttgcaggacgttttgtgatcatgctgacaatgatgccggcaatcatactgagaataaacccagggatgatttcgtacacaccggttgattttgccaggccggttgtaatccagatcaacacggtcgcagccccgacaatcatggcagcaagcgcgccccattcgttcattcgcttccaatacagactgagcagaatcgcaggtccgaaagctgaaccgaagccggcccaagcgtatccgaccaaatcaagaatggtgctgttcgggttcaatgacaagagtaccgcgataacggcaatgactaagacggacaatcgcccgatcatgaccaattctttatcagaagcttttcgtctgaaaaatgaccggtataaatcctctgttacagcacttgctgtgactaagagctgtgaggaaatcgaactcatgatggcagccaaaatagctgacaataagaaccctgtaattaatgggtggaacaagattttagagaagataatgaaaatcatctccggatcttttacagcaactccgaatttatgggcgtatgcaacaccgattaaacccgtcagcacggaacctagaactgtaatgatcatccagctcataccgattcggcgtgcaggttttaaatctttaatgtctttaatggccataaatcggacgatgatatgaggctggccgtagtagcccaacccccaggctaaataggaaataatgctaatgacgctcgcgcctttaaaaatatccaataagtgtgggttaacagcgtcgatttcatggaaagtcggagcaacgccgcccacatgggtaaaagcaacgatcggcacaagcactagtgctgcaaacatgatcgcaccctgcacgaagtcagtcagactgacagcaaggaaaccgccaaacagtgtgtataatacgacaactgcggtggtcagaaacaagcctaatttgtaatccgcaccaaaagcagattcaaacagccgtccgccagataccataccggaagaggtatacaatgtgaaaaagatcatgatgatcaatgcagatacgattttcagcagtgatgaagaatgctggaatcgtttatcaaagaaatcaggaatcgtaatcgcatcatccgccgcttctgtataagcacgcagccttggagccagcagcaagtaatttgagtacgccccgattgtaagacctaaagcaagccataaggtggacagccctgtcgcaaacatcgcgccgggaacacccatcagcatccatccgctcatatcggccgcgccggcagacaaagcagtaacgaatggtccgaggcctcttcctccaagcatgtaatcattgatgtcagtggttttcttgaatgcataccagccgattaacagcatggcaataaagtaaattcctaaagatataataatttcaatactcacgttttaccctctcttcatttctaataatgttgcatcacctctcaaattgatggtgccagttaagcagcctggcgtaagtgcaaaacaaaagaaattcctttgcgggtgcacttggtaacttaacctaacaaagtattcccggccattcaagcgatgaaaccttgatcatgagcggggaaaaccgttgcaaacctagaagggaataaagaataaaacgctttcaagaaataattaaagtaaaaatattcagaaaaatatttcgtttctccttctcctcattttagtataaaatatatagggtattgtttcgaaaacacaggcctgtctcaaggcgttttgttgctttaaagggcttgtttttgatatgatcagtattatatgacttaacggagaaatatgtggaggtggatcatatgtcacgaatttcaatagaagaagtaaagcacgttgcgcaccttgcaagacttgcaattactgaagaagaagcaaaaatgttcactgaacagctcgacagtatcatttcatttgccgaggagcttaatgaggttaacacagacaatgtggagcctacaactcacgtgctgaaaatgaaaaatgtcatgagagaagatgaagcgggtaaaggtcttccggttgaggatgtcatgaaaaatgcgcctgaccataaagacggctatattcgtgtgccatcaattctggactaaaggagggacacaagaatgtcattatttgatcataaaatcacagaattaaaacagctcatacataaaaaagagattaagatttctgatctggttgacgaatcttataaacgcatccaagcggttgatgataaggtacaagcctttttggcattagatgaagaaagagcgcgcgcatacgcgaaggagcttgatgaggcggttgacgggcgttctgagcacggtcttcttttcggtatgccgatcggcgtaaaagataatatcgtaacaaaagggctgcgcacaacatgctccagcaaaattctcgaaaactttgatccgatctatgacgctactgtcgttcagcgccttcaagacgctgaagcggtcacaatcggaaaactgaacatggacgaattcgccatgggatcatctaccgaaaactcagcttacaagctgacgaaaaacccttggaacttagaaacagttcccggcggttcaagcggcggatctgcggctgcggttgctgcgggagaagttccgttttctcttggatctgacacaggcggctccatccgtcagccggcatctttctgcggcgttgtcggattaaaacctacatacggacgtgtatctcgttacggtctggtcgcatttgcgtcttcattagaccaaatcgggccgattacacgtacggttgaggataacgcgtttttacttcaagcgatttccggcgtagacaaaatggactccacgagtgcaaatgtggacgtgcctgattttctttcttcattaactggcgacatcaaaggactgaaaatcgccgttccgaaagaataccttggtgaaggtgtcggcaaagaagcgagagaatctgtcctggcagcgctgaaagtccttgaaggtctcggcgctacatgggaagaagtgtctcttccgcacagtaaatacgcgcttgcgacatattacctgctgtcatcttctgaagcgtcagcgaaccttgcacgctttgacggcatccgttacggctaccgcacagacaacgcggataacctgatcgacctttacaagcaaacgcgcgctgaaggtttcggaaatgaagtcaaacgccgcatcatgctcggaacgtttgctttaagctcaggctactacgatgcgtactacaaaaaagcgcaaaaagtgcgtacgttgattaagaaggatttcgaggacgtatttgaaaaatatgatgttattgttggaccgactacaccgacacctgcgtttaaaatcggtgaaaacacgaaggatccgctcacaatgtacgcaaacgatatcttaacgattccggtcaaccttgccggcgtaccgggaatcagcgtgccatgcggattagcagacggacttccgctcggcctgcaaatcatcggaaaacactttgatgaaagcactgtataccgcgttgctcatgcatttgaacaagcgacagaccatcataaagcaaaacctgaactgtaaggggtgaaaagaattgaactttgaaacggtaatcggacttgaagtccacgttgagttaaaaacaaaatcaaaaattttctcaagctctccaacgccattcggcgcggaggcgaatacgcagacaagcgttattgacctcggatatccgggcgtcctgcctgttctgaacaaagaagccgttgaattcgcaatgaaagccgctatggcgctcaactgtgagatcgcaacggatacgaagtttgaccgcaaaaactatttctatcctgacaacccgaaagcgtatcagatttctcaatttgataagccaatcggcgaaaacggctggatcgaaattgaagtcggcggaaaaacaaaacgcatcggcatcacgcgccttcaccttgaagaagatgccggaaaactgacacacacaggcgacggctattctcttgttgacttcaaccgccaaggaacgccgcttgttgagatcgtatcagagccggatatccgcacgccggaagaagcgtacgcgtatcttgaaaagctgaaatccatcatccagtatacaggcgtttctgactgtaaaatggaagaaggctcacttcgctgtgacgccaatatctctcttcgtccgatcggccaagaggaattcggcacaaaaacagaattaaaaaacttgaactcctttgcgtttgttcaaaaaggccttgagcatgaagaaaaacgccaggagcaggttcttctttccggcggcgtcatccagcaagaaactcgccgttatgatgaagcaacgaagaaaaccattcttatgcgtgtcaaagagggatctgacgactaccgttacttcccagagccggatctagtcgagctctacattgatgatgaatggaaggaacgcgtaaaagcaagcattcctgagcttccggatgagcgccgcaagcgttatatcgaagagcttggcttgcctgcatatgacgcgatggttctgacgctgacaaaagaaatggctgatttcttcgaagaaaccgttcaaaaaggcgctgaagccaaacaagcgtctaactggctgatgggtgaagtgtcagcttacctaaacgctgagcaaaaagagcttgccgatgttgccctgacacctgaaggccttgccggcatgatcaaattgattgaaaaaggaaccatttcttctaagatcgcgaagaaagtgtttaaagaattgattgaaaaaggcggcgacgctgagaagattgtgaaagagaaaggccttgttcagatttctgacgaaggcgtgcttctgaagcttgtcactgaggcgcttgacaacaatcctcaatcaatcgaagactttaaaaacggaaaagaccgcgcgatcggcttcctagtcggacagattatgaaagcgtccaaaggacaagccaacccgccgatggtcaacaaaattctgcttgaagaaattaaaaaacgctaataaaaaagcagcccttagaggctgctttttttatggtcaaattgagataaagacagagatgagggcccgaagcctttcaacttctttgtcgttggttccggtcaaattggacagcatgcctttaataatcggcttgcgcggtttatcctgagtcaattcttcctcgataacatcaagtgacacggtgatatcctcgggcagcgtgctgttttctttcactttctgaatgtcctcaagcagctggtcttttcccgcaggcatcgggttgaaaatgtcttttgatacaatcggattgagtgcagaacggctcagcccctgtacaagatcattcagtctctcaataataaaggctgagatttcttctgcatcgatattaagctcaccgttaaataccatcacgttcatataggaatgcacaatgcctcttgccatgatggacagatctgcgacataccgctcgattccttcgccataggataccagcaaggcgttccggtacagcttatccgtctccatggttactttgtaaaagtattgcttgatttcttgattttccggaatgatattttcggtaagcaaaagaacgataaaatctttatgatcgcgaaaatcctcaaattgagcgccaatttgcttttttaacacttccttagggggctttccggcgagatcttcttctatatttttcattttgttcatagacataccgatataatattcacaggcagataacagcagcgcttctttcgatttgaagtgcaaataaaaagcgcccttcgaaatgccgcattcactggcgatttcttggatcgtcgtagctgcgaatccttttttcgcaaataaacgaatgctggtttttatgattctctcttttttttcattcatgacgtgcttccccttaatccttgaaaaatttagtaaaattttctggtatatgagttgacgttgttgcgttataacgtttagtattatatagaatgaccagtcagtcaataaaaaatgtaatggaggatatgatgaaccacgttattaatttcgttctgaaaaacaaattcgccgtatggctgatgacgattattgtaacggcagccggcttgtatgcgggtatgaatatgaagcaagagtctattcctgacgtgaacatgccttacttgacgatcagcacgacatatccgggtgcaacaccaagccaagtggctgatgaagtgaccaaaccggttgaacaagccgtacagaacttggacggtgtcagcgttgtgacgtcgacgtcctatgaaaacgcatcgtcggtcatgattgaatatgattatgagaaagatatggacaaagcgaaaacagaagcagctgaagcgttagaaaacgtcaacctgcctgatgacgcgaaggatccggagatttcacgctacagcttgaactcattcccgattctgacgctgagcgtgtccagtgataaagataatctacaagagctgacgaaacaagtggaggacagcctcgtttctaaacttgaaggcatagaaggcgttgcgtccgtccaagtatcaggccagcaggtggaagaggttgaattctctttcaaagaagacaaactgaaggaatacggccttgatgaagatacagtcaagcaagtgattcaaggttcagatgtgacaactccgcttggattgtacacattcggaaatgaagaaaaatctgtcgtcgtcagcggcgatattgaaacaattaaagatttgaagaatatgagaatcccgacggtatctgcttcaagtgcaggcagcagcgcagcatctcaagcgggtgcgcagagtgctcaagcagcccaaagcgcacaagcggcagcacaggcgcagcaaagcgcaagcacagcagtgccgacagtcaagctttctgacattgctacaattaaagatgtgaaaaaagctgaatctgtttcacgcacaaatggcaaagacagcatcggcatcaatatcgtcaaagcaaacgatgcgaatacggtagaggttgccgacaatgtcaaagctgagctgaagaagttcaaagaagaccataaaggcttcaattacagcgcaactctcgacatggcggagccgatcacacagtcagttgacacgatgttaagcaaagccatcttcggtgctatttttgcgattgtgattattctcttattcttaagagatatcaaatcaacattaatttctgttgtttcaattccattatcattgctgatcgcactccttgtgctgcagcagcttgatatcacattgaatattatgacgctcggcgcaatgaccgttgccatcggacgtgtagtcgatgactccatcgttgtgatcgagaacatttaccgccgcatgagactcaaagatgagccgctccgcggaaaagccttggttcgtgaagcgacgaaggaaatgtttaaaccgatcatgtcatcgacgattgtgacaattgcggtattcctgccgctcgcacttgtaggcggacaaatcggtgagttgtttattccgtttgccttaacgattgtttttgcgcttgccgcatccctggtgatttcgatcacgcttgtgccgatgctcgcacacagcctgttcaaaaaatcattaaccggtgcgccgattaaagcgaaagaacacaaaccaggcagacttgcaaacatctataaaaaagtattgaactgggcgcttagccacaaatggatcacgtctatcatcgctgttctgatgctccttggaagcttgttcctcgtaccgttaatcggtgccagctacctgccgtctgaggaagaaaaaacgatgcagctcacatacagcccagaaccgggtgaaacgaaaaaagaagccgaaaatgaagctgaaaaagcggaaaaaatcctgcttgaccgcaagcatgtcgatacggttcagtattcattaggctctggcagcccgcttgccggaggagattctaacggtgcgttattctatatcaaatatgaaagcgacacacctgactttgataaagaaaaagataacgttctgaaggaaatccaaaagcaatctgaccgcggagaatggaagtcacaggacttcagctcttcaggcaataacaacgaattaacatactatgtgtatggcgattctgaaaacgatattaaagacacggtcaaagatattgaaaaaatcatgaaggatgaaaaggatctgaaaaacgtaaattcaggcctttccagcacatatgatgagtacacatttgtcgctgaccaagaaaaactaagcaaactcggtttaaccgcgtctcaaatttctcaggccttaatgtcacaaacatcgcaagaaccgcttaccaccgtgaaaaaagacggcaaagagcttgatgtgaacattaagacagaaaaagacgagtataagagtgtgaaagatttagagaataaaaagatcacttccgcgactggccaggaagtcaaaatcggcgatgtggcaaaagtgaaggaaggatcaacatcagataccgtgtcaaaacgtgatggaaaagtctatgcggatgtcacaggtgaggttacatctgacaacgtcacagccgtatcaactgctatccagaagaaaatcgataagcttgaccatcctgataacgtatcgattgacacaggcggcgtatcagcggatatcgctgattccttcacgaagctcggtttagcgatgctggcagcaatagcgatcgtttaccttgtgctcgtgattaccttcggcggagcactagcgccatttgcgattctgttctcattgccgttcacagtcatcggtgccctggtcggactttacgtatcaggtgaaacgatcagtctgaacgccatgatcggtatgctcatgctgatcggtatcgttgtcacgaatgccattgtcttaattgaccgcgtgattcataaggaagcggaaggcctgtctacgagagaagcgctcctggaagccggctctacacgactccgtccgatcctgatgacagccattgcgacaatcggcgccttgattccattagccctcggcttcgaaggcggaagccaggtcatttcaaaaggactcggcgtcacggttatcggcggtttaatcagttcaacgcttctgacgctcttgatcgtgccaatcgtatatgaagtattggcgaagttccgcaagaaaaaaccgggaacggaagaagagtaaaaaaacaaaaagcctcagctatgctggggctttcagcttgttgaaaaaccctcgcattcgttgtcaggtctgcgcgtcggtgctcacgaattctacattcactccgctccaatgctcccccttcctagactacaagggttttcaatcaagctgaaagaatgttaaggatgacaaaagctcaaaacaagaatcagttttgagcttttgtgcgttttcacctgtaagattatgtacattttgttgcgatttttttaactcatagtataattaaaggttgttagtgtaaaaatggatcggatactcttaagtaggatgatgagataatgaaacgtgcacgcataatatacaatccgacttcaggacgggagatctttaaaaagcatcttgcccaggtcctgcaaaaatttgaacaagccggctatgaaacctccacccatgcgacgacatgcgcaggagacgctacacacgctgccaaggaagcggcattgcgtgagtttgacctgatcattgcggcaggcggagacggaacgatcaacgaggtcgtcaacgggcttgcgcctttagacaaccgtccgacactcggtgtgattcctgtcggcacaacgaacgacttcgccagagcgctcggcattccgcgcgaggatattttaaaagcagcagatacggtcattaacggcgttgcccgcccgattgacatcggacaggtcaacggccagtattttatcaatatcgccggaggaggccgcctgacggagctgacgtacgacgtgccaagcaaactcaaaacaatgctcggccagcttgcttattatttaaaaggaatggaaatgctgccttcacttcgtccgacagaagtcgagattgaatatgacggcaagctgtttcaaggtgaaatcatgctgtttttggtcacgctgacaaactccgtcggcgggttcgaaaagctcgcgccggattccagcctgaatgacggcatgtttgatttgatgatactaaagaaagcaaaccttgctgaatttatcagggtcgccacgatggcgcttcgcggcgaacacatcaacgaccagcacattatttatacaaaagcgaaccgcgtgaaagtcaatgtatcagaaaagatgcagctgaacctggacggcgagtacggcggcatgctgccgggcgaattcgtgaatctgtaccggcacattcacgtcgtcatgccgaaggagaaagcggaacagctggatgactaaaacttggctttgtaagccaagctcagaatgttgacaaaatcctaaaacagttttcgttttaggattttgtcatcttttcagcgtgattgaaaacctttgaagtctaggaagggcgagcatcggagcacagcgaatgttgaattcgtgagcaccgaagcacaggactgacaacgaatgcgaaggtttgcctacacgctgaaacttggcttgaataggccaagtttttctttcgcttaaaacaagaggtgaacatacatgaaaatgaaacccccagtagaaaaaaacgaatactatgacgtgacatttgaggatttgacccacgaaggagcgggtgtcgcaaaggtccaaggattcccgatctttgtgccgaacgccctgccggaggaaaaagcccaaatcaaagtcacacgtgtcaaaaaagggttcgccttcggccgtctgattgagctgaaggaagaaagcccgcatagaacggatgccccatgcccgatttacaagcaatgcggaggctgtcagcttcagcacatgacctacgaaggccagctcttgtttaaacagaaacaagtcaaagacgtcttagaacgcatcggcaagctggacctttcaaacgtcaccgtgcacccgacactcggcatggaagacccgtggaactacagaaacaaagcacaggtgccggtaggagaacgggaaggcggactcgtcgcgggattctatcagcaaagaagccatgacatcatcgacatgagcgcctgcctgatccagcaatccaaaaacgacgaagccgttcaagctgtcaaagacatttgcgcaaactacggtgtcaaagcctacaacgaagaacgccacaaaggctggctccgccacatcatggtcagatacggcgttgttacgggcgaaatgatgatcgtcttcatcacaagaacaagcgacttcccgcacaaagcgaagatcatcgaagacatcacagcgcaattcccgcacgtcaaatccatcgtgcaaaacatcaacccaaacaaaacaaacgtcatttttggcaacgaaacaaacgtcatctggggcgaagaatacatctacgacctcattggagacgtcaaattcgccatctccgccagatcgttctatcaggtcaatccggagcaaaccaaagtgctctacgacaaagcgcttgagtacgctgagcttcaaggggaagaaaccgtcatcgacgcctactgcggcatcggaacgatttctttatttctggcaaagcaagcgaaaaaagtgtacggcgtagaaattgtaccggaagcaattgaggatgccaaacgaaacgccgagctcaacggcatcacaaacgctgagttcgcggtcggggaagcggaaactgtgattccaaaatggtatgaagaaggcattacagctgatacgctagtcgtcgacccaccaagaaaaggctgcgacgaagccctcctgcggacgattgtggagatgaaaccgaagcgggtggtgtatgtgtcctgtaatcctggcacgcttgcgagagacctgcgggtggttgaggatggcgggtatcagacgctcgaagtgcagcctgtggatatgtttccgcatacgaatcatgtggagtgttgcgtgttgcttgaaaaaaacatgtgtgagttcgagaaattatagtatatctcggacttccgtcttctttaattcttcgatacactcaattggtttgtgaagaattttttcatcaatagttgggtttgagtgaattgttcaagttgttttagtaaatcatttaaattatctttaagtcggattaaggtctctaatcggagtctctacgcgattttgttttcagataggtatttgtttcaattggataggcttaacaaacaaatttgaaaaaagatcaataagcaacaagtcgaattaccagtcttacagatgtttaatacaatcgaaattgtcccctttgattatcaagggaagttagaggataacatagcagatgctattatgaccattaaaggagcaaataaatcttactttgatgtttgttgattttctttaacgctcattgttctaaagcaaatcttgacaaacggcaaattgtttttggtgttggtcaagatttggattgtctattgtttagaagacaccaataaaaactgcttttaaaaataattaagattgacaaatgaacgacgtagacagctttatgagcaaataaaccaattgtaaaggaaaaaaatcaaatataatcatattgttttcaatgaaaatgaaattacatttactattcccgatatcatagatgtaatcaataggatacaggctgtcataactcaattaaagcaagtgttaataaccgttgatccattggtaagtgaatatgccgaaacttgtgtaaggaagctctctaattagggggctttttgctttaaaaagaatagacatgtatcaattgacaaggaaaaggaaaaagttatatactgtatttaacaaatgttaaatcttctatttaacatagaaataggaggtgtaaaatgcaactcggcgatattgctaatgtaaagacagggcttgtgttaagtaggaaaaaggcagaagttgaatatgatgcgaaagctacatacaagctactttcactcaaaaatattgcggaagatggcatgattgaaaacgattcgtttgaggagtttgtaagtaatgacgatttagacgatcactactttacaaaagaaggtgatgtgctaatgcggttgagccacccacacacagcggttttcattgaaaaacaatatgaagggttgttaattccatcgtatttcgccatcattaaagtagacaaaacaaggttcctacgagagtacattgcatggtatctaaactcatttgaagtaaaaaaagagttggaacgctctcagtcaggtagtcgtatccccagtaccaatcaaaatgtaattaaaacactccctgttgtctggacaactctatcaaagcaaaaagcattaatcgaactttacaagctccatcaaaaagaaaaaatgctttataagagattaattgaggaaaaagacttattattccaagcgatttcacaacaaattttaaaggattcaaaatcggagggaaatattaatgattgaactaacaacacaagacaaaattaacagtgttttatggcaggccgcagatacttttagagggaaaattgattcctcaacatataaagattatattctaacaatgctatttataaagtatttaagtgatacatacaaggagcatttggaagaatatacgaagaaatataatggtgatgaacgacgcattgaacgtgctttatcaagagaacgttttgtacttgatgaacaatctacttttgattatttgtatagcaaaagaaatgatcctaaaattggagaaatcattaacaaagcattggaacgcattgaaaatgaaaacacaggtaaacttcgtggtgtatttcgtaacattgactttaacagtgaatcaatccttgggcaagcgaaagagcgaaatgcaatgttacgatcacttttggaggattttagacatttatctctaagaccatcacagttaggaaatgaagatatagtagggaatgcataccagtacatgattggactttttgcatcggatgcaggtaaaaagggtggcgagttctatacacccgctgaagtatcagaattactggcacgtttagttaaaccgcaagaaaacgaccgtatttatgatccaacatgcggatcaggttcgttgttaataaaagtggctaaacaggttccaagtagaaaagttgctatatacggtcaggaacgtaatggtgcaactcattcattagctcttatgaacatgtacctacatggggttgacgatgctaagattgagtggggcgatacattagcaaatcccttacatttagaggatggaaagttgatgaagttccaagcaatcgttgctaatcctccattttcattagataagtgggctatgggcttcgcaggagaaggaacaaatgacaaaaaatttaaaatggagtcaagttttgatccctatagacgttttgagtggggagtacctccaagttcaaaaggagactatgcatttgttcaacatatgctttattcattagctgaaaatggacgtatggctactattcttccacatggcgtactgttccgaggggcaagtgaagggaaaatacgtcaacaaattattgagatgaacttattggatgcggttattggtttaccagaaggattattttttggaacaagtattcctgcgtgtatcatggtatttaaaaaagaccgaaaacgaaatgatgttctttttattgatgcatctactgaagaacattttgaaaaaggaaaaaatcaaaattaccttcgagaaaaggatattgagagaattgttaggacatatgagaatcgggaaacaattgaaagatactcttatttggcaacaatagatgaaataaaagaaagtgaatttaatctaaatattccaagatatgtggacacttacgaagaagaggaacctgtcgatatgattacagtgaaaaataatatttcgaatataaagaaggaactacaagaagtagagttacaaatggagaagtatttgaaagagcttggattgtaggtgaatatacttgactaaaaataattatgttagaacggcgattggagaattaccttcagattgggaagtagaacttcttgataatatagcagaaagaaaatctggtcatacaccagataagaagatagaagagtattggaacggaaatattccctggatttcattgaaagacttatcacgattaaataaagggtttgtatatgaaacaacggattttacaacaaatgaagggattaagaactcttctgctgttttgttacctcaggggacaatagtcatttcaagggatgctacagttggaaaggttggaattcttgctgaggagatggctacgagtcaacattttatcaattatatttgtggggatagactgaataacgtttatctatactaccatttactatttagaaaccacattttcgaaaggattgctacaggaagcacaattaaaacaattggtttaagtttctttaaaaaactaaaggtagcactacctccaattagggaacaagaaagaattgcttctatcctttctgcttgggacaatacaattgatttaaaagaaaaactaattgattataaaaatgagcagaaacaaggattaatgcaaagattattgacaggagaagtaagattgccagggtttaagggggaatggaaaaaggaaaggattggtaaactcataactgaaagtaaagaaatagcaagtaaaccagatcttaataaaagaataaccgttagacttaatttaaaaggtattcagaaaagagatgtttcatctacagaaaaggaagatgctacaactcaataccttagaaagtcaggacaatttatttacggaaagcaaaatcttcataagggagcttttggcataattcctaaagcgttagaaggttatcaatcttcttcagatattcctgcattcaattttaatgaggaagttgatccttattggtttttttactatttttcaagggagagcttttatacaaacttggagaaaatatcaactggtacaggatcgaaaagaattaacccaaaagatttgtttaaggttaaaatccattttccaccttatacagaacaacaaaaactttcagaagtctttttatgttttgatagagagattagtctacttaaagaagaggtcgaagcattaaaagaacagaaaaaaggtcttatgcaattacttttaacggggaaagtcagagtaagggtataaatcatttactttatttcttcgtttttattaggaggtgtagagatggcaagggagaagagttatgatgaacgttacataagccaagttcctgcaattgaggttcttcgaaggttaggttatcaatatcttgaaccagaagaagccgagcagatgcgtgggaatttgtacaacgtattacttagaaatgttttgcaagaaaagttacggtcatttaattcttatgaatacaaaggggaaatatataagtttagtgactccaatatccaacaagctattcgagatttagatgaaccattaacaaatggtcttgtaaagacaaatgaagcgatttatgaaacgttaatgaaaggaagaacatattctgagtttttacctgatggctcaaaaaagtcatttacaattcaatttattgattggaagaacattgaaaataatgtgtttcatatagtggaagagtttaatgtggaacggatggatggacgtggaaacgttcggcctgatattttactgtttgtaaatggtattccttttgttgtaattgaatgtaagaaagcatccatctcgatggaacaagggataagtcaaatgattcgaaatcagggtaaggattatgttcctcaactgtttaagtttgtacaaatggttatgtctactaacaaaaatgaaactaagtatgcaacatgtaatacaccaaaaaagttttggtctgtatggaaggaagaaaaagaagtatggttagagtcttggttggacaaagctgtagaaagtagattgccaacaacacaggataagaatattatttctctgtttcatcctaagcgtttattagagatcactcaatttttcactctgttcgataaagacgtcaaaaaagtagctcgttatcaacaatattttgctataaaagaaatcattaaaacaattcaagaaagagatgaacatgggaatcgtcaaagtggtgtgatttggcatacacaaggatcaggaaaatcactaacgatggtgatgttagccaaatacattctttctgagttgtttgaatataatccgaaagttgttgttgttacagatcgggttgaattggataaacagattcataagacgttccgtcatacaagattaaaggcaagtagagcaacatcgggcggccatttaattgatctaatcaatgacaacaatgctgatattgtcacaacgttggttcataagttcgatacagcatcttcaaaacaaaaaccaattgagtcaaaggacatttttgttttagtagatgaatctcaccgaacacaatacggagagcttaatataaaaatgaaaaaggttttccctaatgcatgctacttaggttttacaggcacgccgttaatgaaaaaagaaaaaaatacgatgattaaatttggaaagctaattcacacatatacaattgcagatggtgtacgggataaggctattgtcccgttattatatgaaggaaaaatggttgatcaatcggttaatcaaaaggctattgataacagattagagatgattactcgtaatctaaatgacaagcaaaaggaagaagtaatgaaaaagtggagccaatttgaacgaattgcttcctccaaccaaagaataagtatggttgcatttgacataaatgaacatttttttaagaattacaaaacacaaggaagcaactttaaagcgatgttagctacaaatagcaagattgaggctattcgttactttgaatcatttgaagaacttggcgatttgaattgtgctgtagttatttctccacctgaccaacgtgagggacatgaagtggtcgatgtggaatcaaaggacaaagtacagcatttttggaaaagaatgatggatcgttatggaacacctgaagactatgaggatgccataaaagatgaatttattaatggtgatgaaattgacttactcattgtcgttgataaattgctcacaggttttgatgctccgagagctacagtgttgtatgttgataagccaatgaaagaacacactcttctacaagcgatagcgagggtaaaccgtctatatgaaggaaaggattatggctttatagtagattatagagggttattagataaacttgatcaagcaatgcaaatgtactcaggagcagggttagaaaactttgatcctaaggatttagagggagctatacatgatgtcattagtgtaattggttcgttaagacaatttcattctgatttattacaaatatttgctcctattaagaataaacaagatgttgaagagtatgaagtatggttagaagatgaagaacttcgagagagattttatgatgtattaagcaactttgggcggaatcttggtattgcattagaatctgaaaaaattcacaatgctctacggccagaggaacttcaaaagtataagaaagacttgaagtttttccaagagctaagaaaaagtgtgaagctccgctattccgacacaattgatcataaggaatacgaggcaaaaatgcaaaagctaatggataattacatttctgccgaagagattatccgtattacaaatcctgtagatattttaaatgaaaaagcattcgaggaagaattagaacgcctggattcaaaacgtgctaaagctgatgccattcgtactcgtttaacgaaaagtgtaagtgcaaaatgggatgaaaaccctgcattttataaaaagttctctgaacgtattcaagaagctattaaagaatacaaggataaacgaatctccgaagcagagtatctgaatcgaataaaggatataatgaaagattatcgcaaaggtgaatcaaatgacgattatccagaagtgattaaggaaaatcgaaaagcacaagcgttttatggagttgcaaaagaccttatgagcgaagttgcggagatttctgaaagttatggttcggatacactcggagatttagctttaaaaacggataaagtgattaaagaacaccaaaaggttgactggcataataatcttgaaattcacaatcgaattgcacaggacttagatgatcttctctttgattttgcagaagaaaatgggatagaaatagattatgatacaattgataaacttatagagcaaattaaaaccgttgctcttagacgttattaaggttgtgaacagcatggagagacatcaaatccagtacgtaaataaaataattgactttgctattcaacgaaagaatgttaagaatgttaatcttaacattaagcctgatatgacaatagaggtgtctgcacatgatgccgttccgttgaatttcatttatgattttgtgaaaagcaaaggtgcatggattgttaagaatgtaaaaaactttgaaaatgcacaaccaaatagccaaagtgggcgagagtatgtaagtggtgaatcctttaagtaccttggaaaacaatatcgtctacgagtgcaaaatactgaggaagaggaaatagtaaaatacttccgaggatttatctatttattcgttaaagatcccaatgattacgaccgcaaagctaaacttatggatgaatggtatcgtgagaaagcatttatgacatttcaggaatctcttaataagcaacttccattagtacaaaagtacggagttgataaacctaatcttgatttacgtacaatgaaagctcgttggggttccgctttaaccgacaagaatacgattttattaaatacagagctgataaaagcgccaaaattttgtatagattatgtaactttacatgagttaatccattttaagtacaatgaccatagtgaaagattttatgatatgctgtactcattaatgcccgattgggaaaagagaaaagcaattttagatgaagagattgtaaaagacttataagaaaaagaacctctttggcaacttaacaaccagattaatcaacaaaaggcagttcctaattttcatgtggagactgcctttttaatttcttattcggattttattggagaattggtctacaaaattgaggattaattgagaggtgaggtcttggacgaaaatatgtgggaattgtcgttcgcaagtggcaacaaactgcttcacacttcatctgaaatacggtgattcttcataacaggattagatgaacgaggattcgcttgtccaatgtgagtcatcattatctttcattctttcaactaaagacgcgataatagagaaatttttcctaataaaggctatctcgtcactttctgataaaggattttcaataatgaggttatcatcttttacaaatttgcaatctttgctaaccgcttgatgtacacgtaatggttttgcaacacgctgtaggtcgttctcttcttttgggagaagatcatttacaatttggacatgctgtttgctacttatggcagtgaactgtctttgttcatgggtataactctttaaaaaataatgtttattatagtttgataacatgaaattattctcattcggaggaggttttttattggataatacgtataatccttttgataagatgcagtttacatataacaattgtttcctttgtgggagtaaagatgtttcgcaaaaaactttagagcatgtattcccaaagtggttgttaaaaaggtttgagttatggaataagcaaatacaattattaaatggtacattaatttcatataggcaattgaccattccttgttgtaacaaatgtaacaacgaatatttatcacgtattgaaaacaaatttaggagggctgttgacaatggatatgatgcatttttaaatctagatgaagaaaccatctttttgtggtctgcaaaaattttatatggccttttatataagcaattatctttaccatttgataggaagtcaccgcgattgggaaccattacaagtcctgatctattagagaaatataggattctacatttattgttacaaggtgcgaggtataaaactaaatacgaagggaaaccatggtcaatctttattttccagagtcaagaatataaggatgaaagagattttgattatttcgatggattgttttccttagtgttagggattcgtattggaagagttagctttgtaatttgttttgaagatgcgggcatacagaaagtaatgtttgaggattattttagggatttgcaagagatatcattacatccgattcagtttaaggagatcatagcgaaagtacattataagcaaatcttatttagaaaaaatcctttctttatggttgttgaaggaaaagaaaacgatagaactgttttagtgaatcaaccaacaggagacttatttgatgaatgggatttcgaagattattcaaaaattttatcattgttttttaaaccttatggattacatttaaaagatatttatcacccacctggtaaaaccattagttttttatatggagaagaaggggaagttaaacatataccaaaataggtgtattatgaatgacaagataaataaaaaatgtataatttagggaaataagtcatctttgaaggcattgggaagaacccaatgctgtttttcattgttttacttttttgatttagttaatgccttctgctacctattgatataattcacccattttttctgtttccatagaaacctccagttttatttcaaaagctatatcaaatttatagatgtaggtagctaattaaaaattctttatcatcctcgtcttcaggcaaaataccaagagttttgtactcccataatgcaattctttgataccatctaactcagacgccaaaatatcgacattattataatcaagttggaattgactattgctatccaatgccaatgtatggttagtccaaacctgatcattattattttggtgcgcaattcttaatttctcaaaaagttctcggatttcccttaataaagttttgaagatatctttacttacgttgtattgggcaggtatatcttgtgaataaataatttggattattttctggttacttgaagtgaaagagaaccatggtagaatcatttaatacttctacataaagataaatttttgtccattcataaggtatgatgttatttaatttctgattaataagctgatacaaatcttgcatttttttagtttccaatcttttcaccttcaatcgtcgagaaatcttagttatcaaaatagctcagcagagaagggctgagccatttttgatttatagaccgaagtagtttattacaaattctttgtcgtcctcatctttaggcaatatccctaaattttgatatttccaaacatctcgtctttgaaggtcatcaagttcagaggataaaacattatcataattataatcaattgaaaactttccggtgttttctaattttaaagtgagattagtccaaatatcttggttgcctagtttaaattcctcttttagttcttcaaatagcttttgaatttcaattagcagttgatcgtaaatctcttcactcacatcaaagtgttccggtatataatgagaaaataaataatcactgttatttggtgttgtaaaataaaagtatatatctgctgagtcaccaagtatttcagcatataaaacgatcttttcccattgagatggaatcatttcatttagatgttcagcaatcttttgatatagttcacccattttttgagtttccattagattaacctctaactttgaattgttgatggcattatttaatatttaaataatccttaacaaattctttatcctcttcgtcttcggggaaaatacccaagttattgaactcccaaatcatttgtctttcgtattcgtccaaatcagactcaataacatcttcataatcataatcaattgaaaactttccagagctttcaagattcagtgtcaaatttgtccatgcttcgggattattttctttaaattcagtgtgtaactgcttaaacaactcttggaggtctagtagtagttcggtataaatttttttactgacctgaaattgttctggaatgtcgtgagagtatatatattcatcgttttctggtgtttgaaagaaaaaatacacttctctggaaccatctagtatttctgcataaagaacaactttgctccattcggaagggatcatgtcattaatttgttctgctattttttgatatagcacttccatcttttttgtttccactagattaaccccctggtttattttctatagtaacttgtctcgctctacgattacctatcttatattcaacattaaataatacaggtctaagtgaatctccctgataaaccggttctatattaacttttacttgcttaggaggttttccatttaacgcctttgaccacacttgctccattttgtaccatttcccgccgctcctattaatctgagaattcatcggcacgatattgtcgaactggcctgagcctttgaattgggtggcgattaaatggccgccgtcatcgtcaggctttcggtcctggggctttccagcattcgtctgtgcatattggtttcgttttgcttctcccagctgcaagtctgctttgacacttgtaattctaccatagttgtcagtcgtgtatgtgtagccttcttttgttttgtagatgatattgggcttcagcactttctttctgctccatcttgcgaaatgctcgccgtatttgacggttaccggcggtacatgtggtgctggagttcgtcttccgcttgatgacgttccgtatggtttcggaaggatgaccttggcgaatttttgcagtccttctttaagcgtgaccccgttgactgcgttgtaaggaacgcctgccggcactaaatcgtgacggggatgataggggagaatatccgcaagtgtgagatctccgatttgatttaatttggttttgacgtgtttttttgatacttctatgcctgtgtttactttttgtttgatgtgatcaacggtttgttttgagactgttatggctttttgggctgttgcagatttgcttgctgctgttttgacttttgccgtcactttggcggctgtgccagtttttgagacggcgccaacaccttttgtgccgacaactgatgtgacaacagtgcccactgcatatgagacccatcttgctcttgagtaggtgtcaccattcaccatgtctttttcgtatgattcttcgattgctgctgaaatggcttcatacgttttgatcgggtgagccacagctccggtaatcgcttcaacggttcctcccggatctgtgaccatatcccacaggcctacgaccgcgtccttcccggaatcataaaggccgacggcgacccctttgaagcctgcttcaagctcacgcgtgttttcaatttgggtgaagtatctctgctgttctgctgtcagattttcatagccaatcgtctttgccattgagtagaattcatcggcatccgcataatcatagtttttcagtctttctttcagtttttcaatctcgcgttccttcgcttcctctttcttaatcttcaagtaagcctcagtccgcttttcaatgtcgccttttttcttatgtatgtcactctcacggtacgctttggcgttgtagtggatgggtgtggcgtttttgcctttgcctgttgcttcttggagcttttggaagtcggacttgatgaattgttcgtttggttctgacagggcgtattctgtcttcaggtcttcgtccaaggcgtccaatttttccagtgtttttttgcgtttgtcgttggcatcggccagctcgtctttgaaggtttctgttgaaaacaggtcgagcgggaggatgtcgtcgatatcgttcaggatgtctttcatcgcttttttctgttcggacatgatggattttgattttttattggcatttgccagttcgtgctccaggaaggattcttcgatgtatgcgtcagagagggctttgtccttcgcggctccggcgatgctattgaaaaatgcgattttcatgtcgatgtagtcgatccattggtcggtgacgccgacgtggtcgtgatagaaggctttgatgttgctggcgccttttcctgaaaattcgctgtcactgagatcagcgacactttttaacgcttttctcaagttgaccatttgcgttcttagttctttgtactcttttgcacggtctgtcgcttccgaaagcagtgttttcgcttcaaatactttcatgaccatttcccttcttttgttcgctcaatatcaaaattttaccacggggcgggatgagggtgggggtgagaacgtgttttggtggaaaaatgagtcatttggcatgtgtctaagtacacggttttgatatgatgatgatagatcaattaaaaggggaagagctcatttggataaagatttcttaatcataaagatcaaggatattcaaaaaggcgacacgctaacgaaccgcgcctgcgggaactgggatatgaaattgtccagagcaaaagaatgtaaacgggcaattgttgttcggagcggtgtgattttaaatgtttacaagatcgttgacgcttgggaatcagatgaacccgccaagctcactaaaacgaataatagagttcggtttcaattggcagagtgccatgactattcttatatgattggcggtacgctgaaaacgaaaacgcaaaatccggtttcgagtctatccttagaaaccttaatggaactagtaaaataaaaggagcccagcatgtatctctataaagtaaacagccaaaaccaaatcgaagatattcgcgagaaaccgtttaaaaaagaaaaagagattcaggatttatgtgaaatcaatcttcagcggatgttggggctcaggtttgtgaaatctgaattcaggatcagcaatttccgcattgatacgttagcgtttgatgatgagacaaatgctttcgtgattatcgagtataaaaatacgaaaaacttcagtgttgttgaccagggctacgcctacttagcagcaatgctcaatcataaagcagatttcattcttgagtacaatgaaaatcatgatcttccgttaaagcgggatgatgtagactggtcgcagtcgaaggtcatttttatctcacctgtatttacggtgtatcaaaagcaatcgatccattttaaagatctgccaattgaattgtgggagattaaaaggtacgaaaatgatctgatccagttgaatcaaatgaaggctgatggcgtctccgagtcgattaagaccatttcacggcaaagtgagaccattcaagaggtcagcaaagaaattaaagtgttttctgaagaggatcatcttgcagataaaccgtttgacatcatagagctttatcagcagctaaaggaattcatttttaatttggacgatcatatttcaatcaaaccgacaaagctttatattgcgtttacatcaaataagcgaaatttcactgacattcttcttttaaaaagcggacttaagctgtgggtgaatatgaaaaagggagaattgcatgatcccgaggacagaatgcgcgatgtctctgagaccggccactggggaaatggcgactatgaaattttcataaaagatgatgaacacattgaatatatcatgggattgatcaaacaatcctatgagaaaaataagtgagaacttccattgagaagttcttttttattgtggcatgctaaagaagaattcatttcagtccctttcttcttctgtaaaaatgaaatgtacaaactgacaaaagacctataaaatgagaaagctatcatgagagagcagaagggtgagagagacaatgagttataaattagttgcgatgcttttatcgatactattcctattatcggcgtgttctaatagcggatcttctgataaggatcaggaaaagcaagcagtgaagaaagcgagcgttgcgatgctgacggagcaggaagtaaaatcagctttgaaaaacgatattgattcgatctttaatgcatttgataaagcgggaaaagaaaacggctggagcacggcaaacaaggcggatttcaacaagctgcggcctagtgtgctgccttatgcaacagaaacgtttgcagatcagaccttaaaggatttggccggagagtactattgcgagtgtgatgatccttttcaacccggctctgatttcgatgtgcgttttacatatgaacaggacaagaataagatagaggcttcatcaatagacccggcaacagaattaaacaacatgggcacggaatggacgtttgaattgatgaagcaagacggtaattggaagatcaacaaatgggacagcaagtcgcttcaaggggatgatatcaagctgacaaaagaagaagcgaaaacgattctgtctagaaacggtgaaacggcggaatttgtgaagtcctatgaatcgaaggctgccggcggaacagcttatcttttcaatgtgaaaagttcaaatggggaaagacaggcggcgatcagctcaaaggataccagtctggtaagtgataatgaaaacgagactgaagctccggagcaagagacagctcagacgactgcggaaaccgcatcgcctgatacagcggatacacagagcagtgagcagacaacaggaagcacaaaagcagattatgttgccaaattgtcagcgacagaacagaaagaaaagcacaatgactatcaaagtgattatcagatgattgaggattacggttacaattatcaaatgtgggacggattgctgaacgagatatacggcgtgctgcaaaagcagctttctgccccagacatggcggcattaaaagtgaaacagcgccaatggataaaggatagggatgctgcagcccagaagcgatatgatgaggagggcggcggttcattatcccgagtcgtccaaacggaagagcttgccaaacagacgaaagagcgctgttacgagctggtgaatacgtatttgaaataagattgacatgggacccttgcataaagggttcttttttatgaaaaaaacaaattgacaggatgaaaaaacaatttcttccttctatattgttttcaaaatttgggattgatagaatatgacatatctcatagagaaggagggaagccgttgagtcaagccataccgtcttcgcgtgttggtgttaagattaatgaatggtataaaatgattcgccagttcagtgttccggatgctgaggttctgaaagcggaggttgagcaggacattcagcagatggaagaagaccaggatttgctgatctattattctctgatgtgttttcggcaccagctgatgcttgattatttggagccgggacaaacatacgggaatcgccctacagtgacagagcttcttgaaacgatcgagacccctcagaaaaaactcacaggccttttgaaatattactctttgtttttccgcggcatgtatgaatttgatcaaaaagaatatgtggaagcgatcgggtattatcgcgaggcggagaaagaactgccgattgtgtctgatgaaattgagaaagccgaattccattttaaagtggccgaagcgtattatcacatgaagcaaacccatgtgtcgatgcaccatattcttcaggccttggacatttatcaaaaccatcccctatacagcattagaacgatacaaagcttgtttgtgatcgccggcaactatgatgatttcaaacactatgataaagcgctcccgcatttagaggcggcgctagatttggcaatggacattcaaaatgacaggtttatcgccatttctctattgaacatcgcgaacagctatgacagatcaggagacgatcagatggctgtagaacatttccaaaaagcggcgaaagtaagcagagagaaagtgcctgatctgcttccgaaagtcttgtttggattaagctggacattatgtaaagcgggccaaacacagaaggcgtttcagttcatagaggaaggattagaccatatcacagcacgttctcacaaattttataaagaattgtttctgttcttgcaggccgtgtacaaggagactgttgatgaacgaaaaattcatgatcttttaagctatttcgaaaaaaagaacctgcacgcgtacattgaagcatgtgcccggagtgctgccgctgtttttgaaagcagctgtcactttgaacaagctgctaagttttaccggaaagtgctgaaagcccaagaagatattctaaaaggagagtgtttatatgcctattaagaaaaaagtgatgatgtgtctggctgttactttagttttcggaagcatgtcgtacccattcctgacaaactccggcggcgttaaggaatcaacagatcgaaatacgacgtatatcgatcattccccttacaaacttagtgatcagaagaaagcccttagctagggctttttcttgctttacggaagacgttccattttccacatcacggcattccttctatttctaacgcaagacactcgaaacaaccaaaccatttgaggtataatggataaagtgaataacagtatttagattgatatatatgaaagagagtggaacatcatgggccgtaagtggaacaatattaaagagaagaaggcgtctaaggacgcaaatacgagtcgaatttatgcgaagtttggccgtgagatttatgtggcggcgaaacagggcgagcctgatccggaatccaaccaggcgctgaaggttgtgcttgagcgtgcgaagacttacagcgtgccgaaaaacatcattgaacgtgcgatcgagaaggcgaagggcggagcggaagagaattacgatgagcttcgttatgagggcttcgggccgaacggatcaatgattatcgttgatgcgctgacgaataatgtaaaccgtacggcgccggaagtgcgtgcggcgttcgggaaaaacggcggaaacatgggtgtgagcggatctgttgcttacatgtttgacgcgacggctgtaatcggtgtggaaggcaaaacggctgacgaagcgcttgaaatcctgatggaagcggatgttgatgtacgtgacattttagaagaggatgacagcgtgatcgtatatgctgagcctgatcaattccatgcggtgcaagaggcgtttaaaaacgcgggtgtcgaggaatttacagtagcggagctgacaatgcttgcgcaaagtgaagtaacgcttccggatgatgcaaaggaacagtttgaaaaattaattgatgcattagaagatttggaagatgttcagcaggtatatcataacgttgatttaggtgagtaaggagtgagcaggctgttatggcctgctttttttgtcccggaaattgttttagctgtatgtaggcggccgcctatacgatctataagatattctcatactctggactgtaacctatgtgaaggagagagtgaatatgactgatacaagacatatgtatggcggacctggttttggtcattatcagggctttggtattggccacccgggttatggcatgtatggaggccacccgggctttggcatgtatggaggctacccagatcacggcatacatggaggtgtcggcggctatccgggatatggaacgtacggaggatacggaggatccggcggttacccaagcggcggctatggaggctctccgggaactgtaaattatccgaacatgcaccatgaaaatgatggccatcaccactattatcaccatcatcatgatggaaaagataatcttcatcaccatcatcatgatggtcattatggccaccatcaccaccatatgggccactggggaaaagacggttataaataaagaagatgatggtataaagaggacactcttgcagatcaagagtgttttttatcttttttcttgactgttcagtctggaaactggtaacatttgtttcaggaggtgatcgtcttttggggaggaataaagaatttgatacggcacttgttcttcacagggcgatagaggtttttggagagtatggctacgaaggaacgtctcttcaggatctgctctctcatttaggcattgcgcgccagagcttgtatgatacgtatggcacgaagcgtgatttatttttgtccgctgtgaaaacgtatcttgaagggaaaaacactgccgttatggaaaggcttgaagcgccaggatctgtaaaggaagccattcgtgatatttttcaagaaggtgtcaatgctctgagggaccctgaacgggcgaaggcgtgctatatcattaacagcgcgattgaacagattccgcatgaccctgagcttgccctgtattttgaaagacaatccaagcagcttgaggacgctttttatcaggcgcttttaagagcgaaggaccaaggagaattgaatggcgaagatactgatatatctgcgcttgcccggtacctgaatcaaagcaggctgtctctgacatttgttgcgaaagtgacggctgatatggatcggcttcaggaccatgttgacgtgagtttatcagtgcttgattaacatgtggtaaaggattctttgcccatgtatgtatttttcggactgaatagtctagaaataaaaatgaggtgatgatgaatgttgatgaatgaatttgaaaaagcatgtgaaacattgagaaagtttatggcttatatgcttgagaaggacatgaagagctggacggagctttgggatgagaatgctgtatttgagttcccttatgcgccggagggatcaccaaaaagaatagaaggaaaagcggccatttacgattatattaaggattatcctaagcagatccatctttcttcatttaccactccgacagtgtaccgttcagcagactcgaatacggtgattgcggagtttcaatgtgacggccatgtgattgagactggactgccttatcgccaaagctatatcagtgtcatcgaaacgagagacggccgcattgtgcgttatagggattattggaatccgcttgttgtaaaagaggcctttggaggatcatttttgcaaacagaggagagtgggaaatgatgaaacagaatccgattttaatcacgggcgggactggcacagtcggcagccgaatcgccagccgtttaataaagctgggatacagagtgcgtattgcaagccgaaaaaagggcgcgcttgcaagtgcggagtatgtgtattttgattggaaggatgcctccagttttacgcctgctctagaacaggtaaaagacatctatcttgttgctccggttggtgtacttgatccggctccctatgtgcttccctttttaaaggaagcaaagcgtctcggcgcaaagcgggtagtgatgcaaagtgcgtctgttgtctccgagaacggtcccgtgtttggcgcgcttcaccaggcagtgcgcgagtttccagaatggacggtgctgcggccctcatactttatgcaaaatttcatcaatgtccagcaccgcatgtctattcaaacggaggggcgcatcacaacggcttcgggtgaaggaaaacttgggtttattgacgctgatgacatcgcagaaacagccgtcagggctttgattgatgatgttcctcatcaaacacatcatattctgacaggtcccgaggcgctgagctatgccgaagcggcggagatcattggagctgcggcgggacgccgggtggagcatgtcagcatttctcgttccgagctgcagcataaaatggaggcaggaggtttgcccgcggattatgcccattttatggcgaagcttgatgaggcaatcagccatggtgcggaacatcgggtaacggatacagtgaagcatgtgacgggaaaagaacctcgttcgctgtcagagtttgcggctgctcatgctgcatattggaaacactgacctcattttggactgaatagtctagaaagaccttcggcgcttccgaaggtcttcttattgaaaaagctaagtcgtgttttagtcataatcatgcctcctgcctcatacctattaaggtcattgtttttgagaaaggaggagccggaatgaaggatatgcagccgtttacgcctgtcaaatcatatacgccctttcacagccgttttgatccctgtccgcccatagggaagaaatattacagaacgccccctaacctttatatgacctttcagcctgagcatatggagcagttttcgccgatggaggctttgaggaaaggcaccctttggaaggatctctatgatttttatgaaaacccttatcgagggggagacgcacatggcaaaaaaggttgacgccgaatattatcgtcagcttgagcaaatacaggctgctgattttgtgcttgttgagctgagtctttatttaaatacacatcctcatgatgaagatgcgctgaagcaattcaatcaatattccggctattcaaggcacttaaaaagacagttcgaatcctcttacggaccgcttctgcagttcggcaacagccccgcgggcaaggattgggattggggaaaagggccatggccgtggcaagtataaggaggaatgcctgaatgtgggtgtatgaaaagaagctgcaataccctgtcaaggtcagtacgtgcaacccgacgctggcgaagtatttgattgaacagtatggcggagcggacggcgagctggccgcggctctccggtatttgaaccagcgttatacgattcctgataaggtcatcggccttttaacagatatcggtacggaggagtttgcccatttggaaatgattgcgaccatggtctataagttaacaaaagacgccacaccggagcagctgcgtgaagccgggcttggcgatcattacgtcaatcacgacagcgcgcttttttatcataatgcggcgggcgtgccgtttaccgcgagctatatccaagcgaagggcgatccgattgccgatttatacgaagatattgccgcagaagaaaaggcgcgggcgacgtatcaatggctgattgatatttcggatgatcctgatttaaacgattccctgcgttttttgcgtgagcgtgaaatcgtacactctatgcgcttcagagaagcggttgaaattttaaaagaagaacgggataaaaagaagattttctaataggcagattggcctctctttcatacacccttttacatacagagaaaatggtctgtttttgcagtttggtctgcattataatcaagggtgtgtaagcttactttttgattgggaggcctttatgtcagcttttaagattgagaacgaaacgattgcagatggattttacgcgtgtccggccgtctatgaggatgcagaatcgattaccgggttgctcgtccgaacagctgaatggctccgggatcggggttctaaccaatggagcggacttctcaaagggcaagatatacatgatatcacggggtcaattgaaaagggacatgtgtttgtgtttaaaaaagatgaagagcttgcggctgtcgtgatgctgctgcctgcaccgagcgagtgggaccggaagctttggggagacgatgggcatgaggagtccatttatttgcatcgcctcgcagtaagccgccggtttgcgggacaggggcttggagcccgcgtccttcagtgggcggagacgggcatacactttccgggaaaaacacggatccggcttgactgtgtcgctgataacgacgccctgcattccttttatcggcgtatgggatatgaattcatgggtgctgatgcgtccggatatcatttgtttgagaaagagattacggcagaataagcgtcctttgcagggggcttttttgtcttttctaaaagggagggcaggcgatgttgtggccaattttatttgtgacagggattgtgacggcttgtctgtttgctggcgtatccgttttgatgcggatgagatttcctgacaaaagtcggccggaatggatgttggccgggctgatcgtccttggtgtgtttgcgatctggtacagcctcgtgtatgtacgcggctgggaaggggctgcgctcggaatgcttggattcaatgtcattttcggagccattgccggatatttgatcgataaggccatccggcgttacaggaaaagataaggctgctgccgtctctcatcatgtcgaaattttcacagaccggcaggaattttctttcgaaaggagaaatacatattactttaaaatgaaagcgttttccaaagcgggaaggtgatgttgatgatacacagtgtgacaaatgggctgaatcgtttttgtacgtgggtgatgagactggcctatttgaatgtgctttggattttgttttctcttgcaggcctggttgtgtttgggctgatgcccgctactgccgcgatgtttacagtggcgagagaatgggcgaaggggaatacagatgccccggtgttttctgtcttttttcgggcgtttaaaaaggaatggcgggcatcacagatcctcgggcttatcgttgtgacggctgccctgtttctgtttgcggatatgcggatagcggctcagatggaccagcctgtgctcgtcaatgtattcctgagcattagtttgattttcgcgtttgttgtgctgtatgtgttcccggtattttctcattttgacgtaaaaatcagagaggtgctgagcatcagctttttcattgccttcagccgtccggcggtgacgcttttgatggcggcgggcgctgtcggtgtgctttgtctcgttctgtttcatgtcacgtttctattgtttttcagcgggagtttactcagcctgatcttaacgaagctgtcctttaaagcgtttcggtcaatggatcagcggcaggagaaagaaaaggcggcatgaagaaaagagttgctggctggtacaggcggatgaagattaaggataagctgtttgtgtttctatcgttgattatggccgtatcctttctgtttgtatacagcggggtccagtatgcctttcatgtgtatgatgagcagatttaccgcaagtcctcggaggtgcttcggatgtcttctgaaaggatcgaagacgagctgaagaagatagaggatgtgtcatatgaaatcattacggacgaacagattcagcgcatcctgagcatgcaaaatcgcgatgatacgtacgatcagtatcaaatgaagcaggagctgtgggatcagctggcgggatatgccagcgatgaaaagtacatcgattccattcatgtgattgatgcccgcggctcagagtattcagccggaagcagttcttcagatcttttgcagcaggagcaggaagaggtatttaagcgagcgaaagcgaaaaatggaagaaatctttggatgacgctcggcgggtcagatcctgtcctgatttcagcacggcagatcaggtcctatcaccagctgagtttgaacggcttgggcatggtgctgatccaggtcaatgtaaaacagatgattcgtgatgtgccgaaggattggggcgattcagtcggagacattatgattgctgaccaaggcgggaatttggtgtatacggcacatgcatcagcgcatgttcctgaggcagcaaaagagacgctgaagcaccccggttatgacttgataaaaaagaatggcaaacgttactttatttcttatcttcaatcatcctaccaaaattggagctactataacgttatcccctttgatcagatgttcgcgaaaatttcctttatgaaaacagtgatcggcacatgctttctcctctttttctgtgtggttttgcttttcggaaggaaaatcgccaacagcatcacggagccgattgaacagcttgtgaccgcgatgaaatcggtacagcacggcggcattgaagcaggtgtgtcgctttctctgccggaacatacacaggatgaggccggcatgctgaaccgtcattttactgtcatgatgaaacggattaatgagctgatggaagaaaatgtggaaaaacagctcatcattaaagaaaccgaattgaaagcactgcaagcccagatcaatccgcattttttatataacacgctcgagtccatcaattggctggccaaggcgaatcagcaaaagcaaatctcaaaaatggtggaatcgctcggttttcttctgagaaacagcatacatatgaaaaaggatatcgtgaccatacaggaggaggcggacattttacgtcactatatgaccattcagcgatttcgatttgaagagcgcctgaatttcacgttggatattgacgatgaggtgaagcattgcctcattccgaaactgacgctccagccgcttgcggaaaatgcgattcaatacgcgcttgaaccctttacaaggccatgcgccatccggattcaggcgaaaaaggcaaaggaatgtgtctgtattacggtcgaagataacggccctggcatggatggacggattcttgaatcaacgggcggaagaggaatcggactttggaatattcgcgagcgcatcagcctgacattcggagagccatacggcttgcggattcatagtgagcatgaaaaggggacgaggattgtgatcacaataccgtgccgaaatgaggtggtgtgatgtataaaatactgctggctgatgatgagaggattatccttgatggaatggcaggaatcattgagtgggagtcgcttggcgcctcattgatcggtaaagcgcagaacggacatgaagcatatgaaaagattgtacataagcagccgcatatcgtcatcacagacgtcaaaatgcccggcatggacgggcttgagttgatcaaaaaggtgtcagccatcagtccgtcggtgcaatttatcgtcctgtccgggtttggagagtttgagtacgcaaaggaagccatgaaatatggggtgaagcattatttgctgaaaccctgcaatgaacagcagattatcagctcgctggaggaaatcattgctgagctgaagcggcaagatgtgcacaaaaagaaaacagcccatctgaaacacgagctggaccatatccgttcctttgcagccgatcaatacttggaaggcttgatcgcaggtgtagcccagttgtctccgccgccttcacttgccggaaaaaagatccgcctcttgatcttaaaaggggaacaatctattgatgccacaaccagagaggcactcggatcggcactgacagcggtttgcagcagcggagaatggacagtgctcgccgtagaggagaacgccgctgaaaaggcggcggaggtttttgcggaccgcaagatggccatcagtcaggcgggagaactccggcacgcggggcagctgtttcgtgacacagctgaagcgtctggtgacctgcatgggagcgcagtgatttcaaaaatgatcaggcttattgccgacgagctcggaaatccgaatctgtccttaaaatgggcggcgaaggatatgctgtttatgaatcctgattatctcgggaagttatttaagcaggaaacaggcgagaaattttcacaatatgttacacgagtgcgtcttgaacatgcgataaaacagatgaaaatgaggcgggatgcgagtgtatcagaaattgctgaagaaatcgggtttggcgataatccgaagtatttcagtcttgtttttaaaaaatataccggtctgacaccgtcagaattcagaagaaaacagggaggcgcttccgcaggatagccatctctgtttttttgactttcgccactgttttttgagtgtttcgccctatccgaacgctttaaaataaaatgtaagcacttacattaaaaggggggattggtttgaagaagatttgttacgttctgttatcgcttgtctgtgtctttattttcagcgggtgttctgtgggcgaagaggcctcggggaaaaaagaagacattacgctcagaatcgcgtggtggggcgggcagccaaggcatgattatacgacaaaggtaattgaactttacgagaaaaagaatccgcacgtccatattgaagcggaatttgcgaactgggatgactactggaaaaagcttgcgcccatgtctgccgccggccagcttcctgatgtcatccaaatggataccgcttacttagcccaatacggaaagaagaaccagctggaggatttaacgccgtatacaaaggatggaacgattgacgtcagctcaatcgacgagaatatgctgtcgggcggaaaaatcgacaataagctttatggatttacgctaggtgtcaacgtgctgtctgtgattgccaatgaagatttgctgaaaaaagccggtgtgtctatcaatcaggaaaactggacgtgggaggattacgagaagctggcgtatgatcttcaggaaaaagccggtgtctacggttccaacggaatgcatccgcctgatattttcttcccttattatttgcgcacaaagggtgagcgcttttataaagaagacggcactggcctcgcgtatcaagatgatcagctgtttgtcgattactttgaacggcagctgaggctggtgaaagcgaaaacgtccccaacacctgatgaaagcgcacagattaaagggatggaagacgattttatcgtcaaaggcaagtcagcgattacatggaactactccaatcaatatttgggctttgcccggctgacagactcgccgctgtctctctatctgccgccggagcaaatgaaggaaaaggcgctgacattgaagccgagtatgctgttttccattccgaaaagctctgagcataaaaaagaggcagcgaaatttattaatttcttcgtgaataatgaggaagcgaaccagctgattaaaggcgagcgaggcgttccagtctccgacaaggtggcggatgcgattaaaccgaagctgaatgaggaagaagccaacatcgtggagtatgtagaaaccgcgtcaaaaaacatcagcaaagccgatccgccagagcctgtgggaagcgcggaggtcatcaagctgctgaaggatacgtcagatcagattctgtatcagaaggtatcgccggaaaaagccgccaaaacgttccgaaaaaaggccaatgagatattagagaggaataattgacgggaatggggctgacgcaatgaaaaaaagccggagtataagaaaagacaatctggcgggatatgcttttatttctccgtttatcatcgggttcctatgctttacggtgatcccgatgggggcgtccctgtttctgtccttcacgagctatgacttgtttacggcgccgaaatggatcgggctcgacaactttaaggaaatgtttacgggtgacgaaaagtattggcagtctctgaaggtgacgtttacgtatgtgcttgccggggttccgctccgtctcggcttcgcgctttttatcgctgtcattttaaacaatgcagcaaaaggaacggccatttacagaacgctcttttatctgccttcgatcatcggcggaagcgtcgccgtggcgattatgtggcgcaatatttttggcaatgacggggtcatcaatgcgctgctgttttttgtcgggattgaccaaaaaattctttggtaccagaatccgacaagtgcgctgtggacattgattctgctgtccgtctggcagttcgggtcgtcaatgctcatttttctggccgggctgaaaaacattccgtcttcgtatttggaagcggcaagtgtggatggggcaaatcgggtgcagcgtttcttcaagatcacgcttccgatcctcacaccgattattttctttaacctagtgatgcagacgatttctgcttttatgacatttacacctgcctatatcatttcgaagggcgagggcgggccgcttgacgggacacttctctattcgctctatttgttccagcgtgcgtttaactattttcaaatgggctacgcatcggcgatggcgtgggtcatgcttgtcattgtcgggctgattacgctcatattgtttaaaacatcgtcatattgggttcattacgagtcaaaggaggaatgacggatggagccggtcaacgagcctgtcagaaaagccccggtttttgaaagaaaaaaagccgggcgcgtcagtcccaaacgcatactgttccatgtttttacagcaacgctggcggtgttactgctgtacccggttatttggctgtttgtcagctcgtttaaagaaagcgccagtatttttacaacctcacattctctcattcccgacccttttattctcagtaactatgctgaagggtggaagggtatcgcgggacagccgtttctgacgtttattaaaaactcggcgatcattgtcggactgtcaacaatcggtgccgtcctgtcatcggctgtcattgcgtatggatttgcgcgtattccgtttaagggaaaaaaattttggtttgcgtgcatgatggggacgttaatgctgcctcatgaagtgttgatgattccgcagtatattatgtttgcgaaattagactggctgaattcctttaaaccaattgtcgttccgcaatttttcgggcatgcgttttttatatttctgatgatccagtttatccggacgattcccgaggagctggatgaagccgcgcgaatcgacggatgcgggcgctttgcctgcttttggcgaatcattctcccgctgattgcccccgcgcttgcgacgtctgcgattttctccttctattggaagtgggaggagctgattcaaccgcttttgtatttgaataagccggagctttaccctgtttcacttgcgctgaagctttttctcgatacagagtcggcttcgaactggggcgcgatgtttgccatgtcggccgtctcgttattgcctgtgattcttgtattctttttgtttcagaaatatatcgttcagggcatcagtacgaccggattaaaataaaaaggagtgttgcagatggcacagcttatctttgatgaagaaaaggtgacgtcggttattgaccggatcgtgaaacggacatttcagatggattttgcgtgggattggccgggcggcgtcgcgttttacggtgtggcggaggcctatgaagcgacggaaaacgaggaatatatcaatctgttaaaaacgtgggtggatgaacagctggaggatgggctgccgccgctttcgatcaacggagtttccattgggcatacgcttttgttcctccacaaggtgacaggtgatgacgtgtatttggaaacagcggccgagatggcggaatatgtgctgcataaggcgccgcgctttggcgagggtatccttcagcatacggtgaatgcggcagaatacgtattccctgaacaggcatgggcggatacgctgatgatggctgggctgtttatgctgagaatcgggcggatcatggagcgtgaggattattttgaagacggtctgcgccagtttcacggacatgaggatgtgcttcaggaccctgtcacgaatttgtactaccacgcctgggacaacaaagcgcaaaatcatctgtcggggatttattggggcagagcgaacggctgggcggcactcacgatggcaaaggcgctcccccttattgaggtgacacatccttcctttatgatcatcgacggatcgctcagagaccagctgagcgcgcttgtccggcttcaggatgaatcagggctgtggcatacgattttggatgatccggattcttatctggaggtttcggcatcagcgggtattgcttctgctctgatgtcgagcggaaagctgtatacaaaatatgtgcagaaatcgcttgccgccattttggatgcggtggaagaggacggacgggtcagcaaggtatcggccgggacagccgtcatgaaaaatgccgaaggatacaaacaggtgccttacaaacgaatacaaggatgggggcagggacttgcgctgacgtttcttgctgatgttttgaaaacgaaaaaacgcgtgtatcagtaaagacagcggcggggggaaagggatgaaaaaacagcctcaacagaaggaacgggtttctcgctggaagggaaggtatttcaaaagaaactttgtcttcattttgctgattgcctgtattcccggattgctgactggcggcgcaatctactttctttcgatcgacaaggtggagaaagagctgcagagatcgcatgaaacacaggtggcgcgtgaggtcagccgaatggatgagaagctgggagtgcttgaactggcactcacccagatggcctacgattcttcactgatgaacggattggccgagagggatttggagaaagactttacgttctcctatcaattaacgaaaaaactgtttcttttgcgggaccagcagccgctgatcgagcaggcttccatctttctgaacagcccccggccacttgtgctgagccctgaatacagcgctttgacagaacaggaggcgcttcgcaagtatcgctcgctacttgcctcagaccacagcatttattggaaacggtcgggaaatcaagcgatgctgatccagctcattccgggcgcggctgagaaaccgttcggcgcgatcatgctggcggttgatccgaaagaaatggaatcaatcctgcaaagcttgtccccctatcctgatggcagtgcgctgcttttagatcaaaatcaagaggtgctgtttcatgaaggggaaaaagattttaaaaagactttacttcaagagataaaaaaacagcctgctgagaaaggtcatattcagatggaatgggaaggcaaggtgtattctgtctcctttggagaaatgaaccggatgcatcagcaatggacctttgtgtcagcggcgcctctttcagctattacagcgccgatggtgtttttatcaaaagtgatcatcgtgatgctggtcatttgcatcggtttggcggtatgcatgacatggtatgcatcaaaaaaaatctatcgtcccattcagcatttgcttggcttgtttaccggtggagagaagaaagtatggcaggcgtccgggcaggatgaattcaagtggattgaaaagagatggcaggatctatcccttgaaagccggaagctccaagagcagctcctgcggcagacgccccatatgaaaaagagttttttgcagcacctcttgcagggggatttttactatgacaacgaggacagtctcagatctcggatggaggaggccggctggaacatcggcgaaaacgtgtttcatgtgctggatcttcaattgacaggactccgctgtgaaaaaagcatcttctgttgcgatgatgaacagctcgctgtgtttacactgactaatatcgctgaggaattggcggataaacgcgtttttcagctctccatacttgatatcggccggctttctgtcaccgttcttgtgatgaaaacaaacagctctgatctgaaggcgtatataacggagctggcacgccaatttggagatgtaaccggactatgcctgacctcgacattgagcagcaagacggagcgtgtcacggaaattccttctttatttcaggatgtgaaatgcggcaaatcccgcaggaagtttgctaaccgggatcaggtcattgatttgcaggccgacttccctcaggatgagcagttcgctccttattacccttttgagctggaaaaacaaattgttcaggccatccggctggaaagaaaacaggaagccgaggaactgatagatggatgtatgagggaactggcggaaaaggcggccatagacaggcatgtgcattccgccctgattcagctgttttcccgcattcaggaggatattttgcattccgggctcaatcctagcgaactgtttcagcatcggaacccgtttcttgatatttcagaattgcgcgaacctaatgaagcggcggcctggctgatggatgtagtggtgacgccttacctttccaagcttgagggcagaaaaaacagacagcaaaagcagctggcagaacgtgtgattgcgatgattcacgaacagtatatggcggatatttcattggaaagctgtgccgatgcgcttggcatgaattcatatacgttaagcaaggcatttaagcaagtgaccggcattaattttatcgattatgtgacccagatcagaatcgaaaaggcgaaagaattgctggtcaatacgaataaaaaaattcatgacgtgtcagaagaagtcggttaccgccacaattactttaaccggatttttaaaaaacaggtcggcatgccgccgggtgtcttcaggcaaatgtatcaggaaacgccgtgaaaggagagaacatgtgatgaagaaaccgattcaagtatttttagcgggagattccactgtgagtgactgcccgcctcatgaagcgccgatggcggggtgggggcaggtattcgggcaattgttttctgaagaggtagtggtgcacaatcatgccaaaggaggagcgagcaccaattcttttgtggaggaaggaaggcttcaagcaattgccgaacgcatcacacaaggcgattatctgttgattcaattcggccacaatgaccaaaaaccgcgggggacgaagccgtactccacgtttcagcaatttctcaccctgtttgcagatacggcacgcgaaaagggcgcgcatcctgtgttcgtcacatcggtgcagcgccgccgcttcgatgaaaacggacgaatcgagcattccctcggtgagtatcccgatgcgatgaaagcactggcgaaggagctcgatgtacctgtgattgatctgcttgcgaaaacaaaggtgctgtatgaagcatacgggccggaggagtcgaagcgattgttcgtttggtttcagccgaatgaacatccgaattacccggacggcattgaggacaatacgcatttttcggaagaaggtgcaatggaggttgcgaagcttgtggcagaaggccttgaagagatcggacttccgcttaaggaccaccttgtgagccgggagggaaaagaacatgtataaggaaggcacttgcttgtaccgcaatccgctccggtctaaaagcgatgtgaaggactggcggatggagggaggcgggcagatctcatttgacgatcacagcttgcacctgtcacatgtccaggatgaagcgcactttgtcttttggtgtccggaaacctttccagacggcatcattgtgacatgggatttctctccgattgagcagcctggactgtgtatgctgtttttttctgctgcgggaatgggaggcgaggatttgtttgatccaagtctccagaaaagaacgggaaaataccccgagtatcattcgggggacatcaatgcgctccacctgtcgtatttccgcagaaaatacgcggaggaaagagcgttccgcacctgcaatttaagaaaaagccgcggtttccacctcgccgcaatgggggccgatccgctgccttctccagacgacgctgattctccgtatcgtatgaagctgatcaaagacaaaggctatgtgcacttttcaatcaatggtctgcccattcttgagtggatggacgacggcagcacatatgggcctgtgttaacaaaaggaaaaatcgggttccggcagatggcccccatgaaagcagcttacagggattttgtcgtgcatcaagcggtgagaagatgaagacgactgtaacggatgcgctttatgcaggctgcgaagcggtggtgaaaatagcatggctcaacgggctgtggctgttgtttacacttttgggcggcgttcttttcggatgggcgccgagcacagccgcgatgtgtgccgttataaggaaatggctgatggggcaaaaggatgtcccgatatttccgttatttctcgatacctataaaaaagagtttctcaaggttaatgcgatcggattggcgttttgggctcttttgctcatattgtccgcgaactatcattatttttctgccagtacggattggctgtcctttgccgtaacaagctgcacgctgcttgcagggcttttgtatatcatcgcgctgatgtatgtgtttcccctttatgtgcattaccagctcccgcttcgcaaatatataccgcaggcactgctatttggcgccatgaggccgctgacaactggctgtatgctgatcgggtgcggatttgtcctttatttgctttatacgcttcctggcctgatcccattttacggcccgtgtttatttgggcttgtgttgatgttttttgctcttaggggatttcaaaagacggaggcccagcaccatcaagccgggtaacaaaaaaatgacaaatacgcaaaaaagtgcagtgtccgaaataggcagatgcaaaaaagtgaaattgaagacagctcacacagcgcataaaatccaatttaagtaagcgcttacaaataaatgagaaggagctgtctgatgattacacgaaggaaacgcatgtttaccgctgttacgttgctggtcttgttggtgatgggaacctctgtatgtcctgtgaaagctgaaggggcagcgcggcagatggaagcgctgaaccgggggcttgtagcggtcaagacggacgggggcatttttgtcagctggcggtttcttggaactgaaaacgcatctgttttgttcaatgtgtacagagacgggcaaaaactgaatgctgcgcctgtcaaaaccacgaactatgtggataaaaacggttcggcgggctcaacgtatacggttcgggctgttgtaaacggtaccgaacagccggcttctgaaaaagcctccgtatgggcgcagccgtatcattccgtcccgctggataaaccggctggcggcacgacgccaaagggtgaagcttacacgtacagcgctaatgacgcaagtgttggcgatgtggatggtgacgggcaatacgagctgattctgaaatgggacccgtctaactcaaaagacaattcacaggatggctatacgggtgacgtgctggttgacgcgtataaactggatggcacaaagttatggcggatcaatctcggcaaaaacatcagagcgggcgcgcactacacccagtttatggtgtatgaccttgatggtgacggaaaagcggaagtggcaatgaaaacggcagacgggacaaaagacggcacgggaaaagtaattggaaatgccaatgctgattacagaaatgaacaggggcgtgtgctttcaggccctgaatatctcactgtgtttcaaggttcaaccgggaaagagcttgtcaccgcaaattttgaaccggcgcgcggcaatgtgtcggattggggagacagctacggcaaccgtgttgaccgttttctcgccggcattgcctaccttgatggacagcggccgagcctgatcatgaccagagggtattacgctaaaaccatgctagttgcctataacttcagggatggaaagctgtcaaagctttggacgctggactcctcaaagtcaggaaatgaagcgtttgccggacaggggaatcacaacctgagcatcgcggacgttgacggggatggaaaagatgagattattttcggctcaatggctgttgatcatgacgggaaaggcatgtactcgaccggcttaggccatggggatgccctccatacaggagatcttgatccgggccggccggggcttgaggtgtttcaagttcatgaggacaaaaatgcaaaatacggcttatctttccgggatgctgcaaccggaaaaatcctttggggcgtttatgccggcaaggatgtaggccggggaatggctgctgatattgacccgcgttatccgggacaggaagtgtgggcaaacggttctctctactcagcgaaaggagtcaaaatcggaagcggggctccgtcctcgaccaacttcggcatctggtgggacggcgatctgctgcgggaacagctggacagcaaccgaattgataagtgggattatcaaaacggcgtatcgaaaaatgtgctgactgcatcaggcgcagcggctaacaacggcacaaaagcaacaccaacgcttcaggctgatctgctcggtgactggcgcgaggaagtggtgtggagaacggaggacagcagtgcactgcgcatttacacgacgaccattccgactgagcacaggctgtatacgctgatacacgatccggtgtaccggcttggcatcgcctggcaaaatgtcgcctataaccagccgccgcacacaagcttctttttaggagacggcatggcggaacagccaaaaccaaatatgtatacgccttaactgaaagggggaaggaacgggctgcgcgcagcccgttcccattaaaatgaaaccaaaaaagaggcaaatggaatacctgaccagaggtttgattgcggtaaagacagaacagggcgtgtttgtcagctggcgttttctcggcacggatcatgagacgacggcttttcacctttatcgggatggaaagcggatcacccgcgatccaatcgatgaaagcactaattttctcgatcaaaatggaacggctgactctgtttatcaagtggcggctgtcaataaaggacgggaagaaaagctttccaaggaagctcgtgtttggcaggaaaatgtcctggaggttccgcttgccaaaccggaaggcggtgtggcgccggacggaaagccgtacacttacagcgccaatgatgccagtgtcggggatatagacggggatggagaatatgaaatgatcctgaagtgggacccatccaattcaaaagacaacgctcatgacggttataccggggaggtgctcatagatgcctataaactggacggcacctttttgtggcgcatcaacctcggcagaaacatcagagcgggcgctcattacacgcaatttatggtgtatgaccttgacggtgacggaaaagcagaaatcgccatgaaaacagctgacggcacaacagacgggaaaggacatatcatcggtgatgagcatgccgattttagaaatgaacagggaaggattctgtccggaccggaatatttgacggtgtttaaaggagaaaccggtgaggcgctcacgaccgtggaatatgaaccgccccgcggcaaactggaggattggggagacggctatggaaatcggatggaccgttttctcgccgggatcgcttatttggatggggagcggccgagcctcgtgatggcgcggggctattatacgagagccgttctcgtagcatacgatttcagaaacggaaggctcaaaaaacgctggctatttgactccaaccagcagggccatgaagcgtacgcaggacaggggaaccacagcttgagcgtggcagacgttgacggagacggaaaagatgaaatcatatacggcgcaatggctgtcgatcatgacggaaccggcctgtactcaacggggctcgggcacggagacgcgatgcatgtaggggatctggacccgtcacgaaaagggcttgaagtgtttcaggtgcatgaggacgccacgaagccgtacggactgtcactgcgagatgccggaaccggtgagatattatggggcgtccatgctggaactgacgttggccggggcatggcagctcatattgatccaagctacaaagggtcgctcgtctggggaattgatccgccgggcaatgatggcatgtcgtatgggcttttcacgagcaaaggcgaaaaaatcagcgacaaagcgcccgcttcagccaatttcgccatctggtgggacggtgatttggtcagagaactgcttgatcatgactgggacggaacgattggcaggccaaagattgaaaaatgggatgctgaaaacggctgtctgaagacgatatttcagccggccggcgtgctgtccaacaacggcacgaaaggaaacccggttcttcaggccaacctgttcggagactggcgggaagaagtgatatggagaacggaagacagcagcgcgctccgtatctatacaacgacacatctcacccgccaccgcttttacacgctgatgcatgatccggtttacaggctcggcatcgcctggcagaataccgcctacaaccagccgccgcacacgagcttttacctcggaacgggaatgaaaaaaccgccgaagcccgccctgtacatagcgggaagtaaagcggaggcgccgctgtaggaggactaagggataagacgcaaaggctgaacgctacgacaagatgattaacgaacgggcaggacgaaccaatgctcaagcgctgtacgcaccggtctttttcaagggaagagctatccgtgatggaagctgtataaaaaacgaggaggaatgaaaaaatggcaaatcatatttatcttgccggcgattcgactgttcaaacgtatggagacagcacaaatcaagggggctgggggcagtttctcggctcgcatctgccggagcatattcaagtgatcaacagagcgatcgggggaagaagctcgaaaacatttgtggaagagggcaggcttcaggcaatcctcgatgtgattgagccggatgattggctgttcgtgcagatgggccataatgacgcgtcaaaaaataagccggagcgctacaccgagccctatactacttataaacaatatttaaagcagtatatcgcaggcgcgcgggaaaaaggcgcccatccgcttctcattacccccgtagcccgctttcattacgaaaacggcgtgtttttgaacgattttcctgattactgcattgccatgaagcagacggctgaagaggagaatgtccagctcattgatctgatggagaaaagtctcgctttctttactgagaagggcgaggaaaaagtgtacacctattttatgatttcagaagggattaacgattacacgcattttacaaaaaaaggcgcaaatgaaatggcgaaacttgtggcaaaaggcataaaggagctcggcctgccattgacagaatcgatcatcaaagaaaggtgaaaatgggatgagaaaactgtatcatggcgcttgctattatccggaattatgggatgaagagacgattcagcaggacattgacatcatgcgtgaagttggcgtaaatgttgtgcggatcggcgaatttgcctggtctgtcatggaacctgaagaaggaaaaattgacgtcggttttttcaaagaaatcatcgcccggctgtatgatagcgggatcgaaacgattatgtgcacgccgacgcctaccccgccgatttggttctcacatggccggcccgaacgcatgcatgccaatgaaaaaagagagatcatggggcatggctcccgtcagcatgcctgtacgaacaacccgtatttccgaaaaaaagccgccatcatcaccacagccatcgccaaggagcttggccggctcccggggctgatcggatggcagctagacaatgagtttaaatgccatgttgcagaatgcatgtgtgagacatgcttgcgcctatggcatgactggctcaaaaatcgctacggggtaattgagcgcttgaatgaagcttggggaaccgatgtgtggagcgagacctatcagacgtttgagcaagtcccgcagccgggaccggccccgtttctgcatcatgcctctctacgcactatgtatcagctgttttcgatggagatgatcgcttcgtttgcggatgaacaggccaaaatcatccgctgctattcagatgcgccgatcacgcataacggatcagtcatgttcagcgtggacaatgagcgaatgtttcagaatctggattttgcctcctatgacacgtacgcttcgcaggaaaacgcctctgcctttttattgaactgtgatttatggagaaatctgaaacaagggcgcccgttttggattttggaaacgagtccgtcgtatgccgcctcgcttgaaagctccgcttacccgcacgcagacgggtatttgcaggccgaagccgtatcgtcctacgccttagggagccaggggttttgctactggctatggcgacagcaacgttcaggcagcgagatttcccacggttcggttctcagtgcctggggcgaacccaccatcggctatcaaaaggtgctggcggttgagcgggcaagaaaggaaatcgagcctattattctatcgactgaacccgttcaagccgaggcggcgatgacttactctgacagagcaaaagcatttattaaaactgagcctcaccggggactccggcatcgttcgcttgtgacgcatttttatgaacgtattctcaacacggggattcaccgtgaccttattccggaaggcgctccactggacggctatcgcttgctgtttacgccatttgtgccgtatttgtcttctgaatttatcaaaaaagcttcggcattcgctgaagcgggcggcatctggatcaccgggccgctgacaggagggcgcacatgcgagcataccattcataccgattgcggacttggcgaacttgagaaaacgtcagggatcaaaacactttttacctttccgatgaatgagaacgtgaatacaggaaaagcgtttggcatcacggcgccactcggactatggagcgcggtgtttgacacagagagcggaaacacccttggcacggttgaatcaggaccgggggcgggccatgcttttctgacggaacagaattacggcgaggggaaaattgtcatgctgggatcgcttccatccgggaaagaaggggatgcgatgctggaagcgctcgtcaggcattatgcggaggaagctgttatttccagccggtcggatgtgacgcccggcacgatcgttgccccgcgcaaaggcgaaaacggccttgtgtggatcgttgtgaatatggatggaaaaggaggaagtgtgacactgccggaagcgggaacagatctgttgacgcaccgcttggaaaaggcggggaggctggcggtcggaccgcatgaataccgtgtgattcaatttgacaatcacagctgattctttgcatcgaatcagcttttttctatggagggagagaccgatgaaaaagatcaaatggttatcaggacagccaaaggtgataagtggtgtgacgtggggcgtgccatggaaaaaaggagaattaaaaaagggtgaccgtctggcgcttatgaatgaaaacgcggaaatgcgatatgtgcaaagcgaaccgttggcctattggccggatgggagcatcaagtggacgaagcacgcggcggtgtttggtggtcagagaaaccaaatatttacagttcgcaaaagagaagtgccgcagccaactgaatcgctcagcattcatgagacagagcatgatatccaagtgaatacaggagcactcgtttgtaccattcataaaaaaggatctgatttcattcaatcattgcagatcaatggaaagccgatcgccgcaggcgggaggctcgttgcgataagagaaacgagaaaggagtcggcggcggaaacggttcttttgcatgaaaggtctgtcagctttatcaaacgggcggcgattgagcagagtggtcctgtcaaagcagtagtcaaaatcgagggagtgcatgtgctccataaaacgtatgaggaatggctgccgtttgtcatccgattaacgttttatgccgggctgtctgagatcggccttgtgcacacgcagctgattgacaggagcggtaaacaagaattcataaaggggctcggcatcgaattcgacctttttttggagggagagccgtacaaccgccatttccgctttgcgggagagaaagggatgtacaaagaacccgcccagctgtttggcacacgtaaattcaatgaacgatatccgctttatgaaaaacaaatcaatggcgaaatgctgtctccagatgaagagcataaggaatggtttgcacatggcacacagaatgtggtttgggacgatgtcaagcttgtgcaagattccagcgatcattacagcctgtcaaaacggaccggaaaagattatgcgtgggttggaatgctgcatggcagccgggcgaaggggctctgctatgcgggcggaaaaaatggcggtgtggctctcggcctgcggtatttctttgagaaatatccttcagcactggaaatcacaggtcttgccggcagccgccccaaaatgactatctggctttggcctccggacggcgaagcgatggatttgcggcattatacaggaaacacccacgtggccagcgcgtatgaaggatttgatgaaatgcgctctgatccgacaggcattgcgaacacaaatgaaatcagcctggcgtgcttttcgcacatgccgtctgacgaagtccttaatgcactcgctgacaaatggcaggcgccgccgctcttgatatgtgagccaaacgtctattacgaatcaaaagcgctcggggtttggagcatcattgacacatcccatccgctcaaaaaagagctggaggaacagcttgacgccgcctttctgttttataaaaaggaagtagagcagcgcaaatggtacggtttttggcattatggcgatgtcatgcatacgtatgacccgatccggcatatgtggcggtacgatctcggcggatacgcatggcaaaacaatgagctcgttccgaccttatggctgtggcaggcgtttttccgctcaggcagagaggatatctttcgcatggcagaagccatgacccgccatacgagcgaaacggacagctttcacctcggtgaatacgcaggacttggttcacggcataacgttgtgcactgggggtgcggctgcaaggaagcgagaatcagcatggccgggctttataaattctattattatctgacgggtgatgagcggacgggagatcttttgacagaagtgaaggatgccgattatgccctcgtcaaaaccgatccgatgcgcgctttttacgagaaaggcaagcacccgactcacgccagaacgggaccggactgggcggcgttttgctcgaattggctggcggaatgggagcggaccgaaaatccggaatatctccacaaaatccaaacgggaatcaactgtctgaagcggctgccgctccgcttattatccggcccgacatttgaatatgacccggcgacctcgatgcttcatcacatgggagacggcattgcgggcggatatcatatgatcattgccttcggcgcgccgcaagtgtggatggagctggctgagcttcttgatgaccgggaatgggaggatatgctgagtgaattcggcgaattttacacactcagtgatgaggaaaaacgaaaaaaaagcggaggcgctcttcatgacgggcattttcactggccgatgttcgccgccagtatgacagcctacgccgcaagaaaaaaacaagatcctcatctcgccgccaaagcgtggaatcttttgctagaagataagctcagccatacgccgcttccgatcaaaccggagcgcatcgagacatggacgcagctagaggagcttccatgggtgacaacgaacactgtctctcaatggtgtttaaatgtcatagcggcgctggaactgatcggagattcccttccggcaaaaaaagaaacatcgggcaaaaaaggataacagccggaatttcataggagaaatggtgcaaaaaatgaagattgcaagaatttatgtaagcgctttatattgagaggggcaaaggggaaatgcaaattgaaaaaagggggacttacgcaacatgaaaataagaatgcgaaagaaatggatggccttgccgcttgctgccatgatgatcgccggatgcagccattcggaaacatccaattcagcaagcggttcgaaagatacgatcaaaattatggcgccgcttttatcgccggaaagcccgagtgataagagcccttcattaaaagcactcgaaaaatacacaggcaaagagattaaggtcacatgggtgcctgattcatcctacaacgacaaattcaacatcgtcatggcttcaggagagatgcctcacgcgattgtcattaaagataagtcagccggctttatcaaatctgtcaaagcaggggcgttttgggagctgtctccttatttaaaagactacaagaatttaagccaggcagatgaaaagattttgaagaacagctcggtgaacggcgaggtgtacggaatctacagaacgagggatctgatcagggcgtgtatgatcatcagaaccgactggctgaaaaatgtcggtctgaatatgccggaaacgcttgatgatttctatgaagtgctgaaagcctttaaggaaaaagatcctgacggaaacggcaaggatgatacgtacggcatggtcgtgccgaaatggatgggactcggcaacggaagcccatgggatgttctgcaaatctggttcggcgctccgaaccgctacggtgttgaaaacggaaagctgattccggattttacaacgaaggaatacatggatgcgctcacgttttttaaaaagctctatgatgagggattgatcaataaggactttgctgtcatggattctgcgaagtggaatgatccggttgtaaaaggaaaagcgggtgtcatcgttgatacaggctcaagagcgtctcaaatccaaagcgcgatggaggaggcggatgagtcgaacaaggatatcattgatatcgtcggctcgcttgagggaccgaatggcaagcgcaccttcccgacatctggttattcaggcatgatcgcgataccaaaatcaagcgtcaaaaccgaaaaagagctgaaagaggtgctgtccttcctcgataagatgaatgataaggaagcgcagattctcacgaacaacggagtgaagggccgcaattacgagctcaaggacggcgtattcacctcacttgaaaaaaacaacaaatctctcctgtatgagcatgaaggcttggcacagttcagcatgtcgattccaaaaagcgagtattacatcgaagaccagaaaaccaagctcttccagcatcgcaaggacatcataaccgaaggagaaaaaatagccgtctttaacccggctgagtcgcttgtatctgatgtctatacccaaaaaggagcccagcttgacaacatcatcctcgacgcgagaacacaatttatcattggagaaattgatgaaaaagggttcgatgatgcggtggagctttggaaaaaaagcggcggcaatgaactgatgaaggacttgaacaaattgtaccaatcgtcaaaataaaccgatgcgcctgccgttcggcgggcgccccggtatcacgaaaggagaacagatatggaaacagtgccgaagaagggagatgcacctgttctcaccgctggaaaaggcatcagctggatggctgcgctcaaacgggacaaatggctttatcttcttcttattcccggtctgctttatttcttgattttcaaatacttgccgatgtggggtgtgctgatcgcttttaaagactattcgccatatctcggcttctggaaaagcgaatgggtcggctttgattatttcaaagacttttttatgaatccggattttttccggctgctgcgcaacaccctcatgctggcgagtctggatcttttgtttgcctttcccgcgcctctcattttggccctgcttttgaatgaggtaagaaaggctgtgtataaaagatgtatccaaacctttatttacgtaccccattttgtatcatggacaattgtggtcagcatcaccttcgttttttttactgtcgatacaggtgtgatcaacaaaatgatcatgagcctgacaggtgagcagatttctttcttgtcggatgcagactggttccggccgatgattgtgatgcaaagcatttggaaagagacaggctggggaacgattctatttttggcagcgcttgctacggttgatcaagagcagtatgaagcggccatcatggacggagcggggcggttcaggagaatgtggcatattacgctgccggcgataagaagcaccattatcgttttgttgattttaagaatcggcagctttttgaatcttggctttgaacaggtgtatttgatgacgaactcactcaaccgcagtgtggctgacatcttcgacacgtatgtgtacatgatggggattacccaaggggcgtatagctacagcacggcggtcggtttgtttaaatcagttgtcgggattatcttgatttttggcgccaattacattgcgaaaaagtttgatcaggaaggattgttttagaggagggagaggtatggctgaaattcacacgatgcacaacaccaaagccggacgggtgtttgacgtctgcaacattctgtttctcggcggtgtcggcgcgattaccattttgccgtttttatatattatcgccggttcctttgcgacagaagcggaacttgcccagcggagcttctttattttcccgaaaacctttacacttgatgcttacaagtatgtgttttcgacaccgacgttccttcgaagcatgggcgtgtccatcttcatcacggtggttgggacggctgtacagctatttttcaccttcacgatggcgtatccgctggcgaagcggcatgtgaagggacggaatctgctgttgaatctggtgattttctccatgctgttttcaggcggcatgattccgacgtaccttgtcgtaaaatcacttggccttttggatacgtattgggcattgattctgccgatggcgattaatccgttcaaccttattattatcaaaaacttctttcagcagctgccgcgcgagctggaggaatcagcaaaaattgacggctgttccgaaatcggcgtcttctggcggatcgccctgccactgtcaaagccggttatagcgacctttgcgctgttttatgcggtcgggatttggaatgatttcttccacgctctcttatatatcaatgacagtgcaaaatggccgctgcaaatggtgcttcgccaagtcacgattttatcggatttaacggcgaccaatggcgatacgatgcaaaatgccgttccgccggagcagggaattaaactcgctgtcattgtcattgcaacgctgccgattttggcggtctatccatttttacaaaaacactttgcaaagtggatgctgatcggttcggtgaaaggctgagaaagggagtgtttcatatcagtacattagatcggattaagattgcctatatcggcggggggtcccaaggctgggccagaagcctgatgagtgatttgtcgattgatgaacggatgtcaggcacggtggcgctctatgatcttgattttgaagccgctcagaaaaatgaagtgatcggcaatcacagcgggaacggcagatggagatatgaggctgtttctactttgaaaaaggcgttatcagccgcggatatcgtcattatttccattttgccgggatcactggatgatatggaagtcgatgtccacttgcctgagcgctgcggtatttatcagtctgtaggtgatactgtcgggcctggagggatcatcaggggcttgcgtgctgtgccgatatttgcggaaattgcccgggcaataagagactacgcacctgaatcatgggtcattaattatacaaacccgatgtctgtctgtacaagagtgctgtataaagtgtttcccggcatcaaagcgattggctgctgccacgaggtattcgggacgcaaaagttattggcggaaatggtcacggaaaggctggggattgaggtgccgcggcgtgaggatatccgcgttaatgtgctcggcattaaccattttacatggatcacaaaagcctcttaccgccatattgacctgctgcctatattccgtgaattcagcgcgcactatggggaatcaggaggatatgagctggagggggaaagctggagggacagcgtcttttgttcggcacaccgtgttgcgtttgatttatttgaaacgtatggcgccatccctgctgcgggagacaggcatctggcagagtttcttcccggcccatacctcaaacagcctgaagtatggaaatttcatctcacacctatatcattcagaaaacaagacagagctgagaaacgacaagaaacagaacggttgatcgtgcaacaacgaggcgttgctgagaaagcttcgggagaagaaggcgtgaatatcatagtggctcttctcggattgggtgaactcgtcacaaatgtaaatatgccgaatcaaggccaggtctcaaaccttcctatacaagccattgtcgaaacaaacgcattcatcacaaggaaccgtgtccagccgattttgtccggagcgcttccgaaaggtgtggaaatgctggcggctaggcatatatccaatcaggaggcagtggcggaagcaggtttaacaaaggacactggcctcgcgtttcaagccttcctcaatgacccgcttgtcaagattgaccgcagtgatgcagagcagcttttcaatgacatgctccaatgcatcatgcaacgttgagcggagtttttccggtttagaaaggaaagcattgaccatactgatagtattatcaagaagtaggtgctatcaatatgggaaattatttaagcgttgcggtagaactggtctgcggtttaggcattttatttatcatcttaaagcttctcgggaaaacccaattttctcaaattacgccgtttgactttatctctgctttaattttaggagaattagtcggaaatgccgtttacgatcatgaaatcaaaatcaaagaaattatttttgcttcgctattgtggggcgtgctgatttatattattgaatttatcacgcaaaaaatgaaatcatcgcgaaagttcttggagggcgagccgaatatcgtcatccgcaaaggggagcttcaatataaagtattgaagaaaaataagatggacattaaccagctgcaaagccttttgaggcaagcggggagcttttcgattcaagaagtagaatatgcgattttggaaacaaacgggatggtcagtgtgcttccaaaatccgactttgacaaaccgaccaataaggatttgcaggttccttcgaagtctgtttccctgccaatcacgttaatcatagatggagagcttgtccgggataatctgaaggaagcaggtgtggatgaacagtggctgaagcaagaattgaaaaagaagaacattgataagacggaggacgtgttatttgcagaatggcataaaaataagccgctgtataccgtaacatacgaacaaagcagatcaacatgactcttagaaaaaagcttgcagcaaggcgcaagctttttattgattgtatgtcccttgtttgacagcacgtacatggtacatgctcacttcagtgctgatcagatagtcaggctttggtttgcctttgtttgctttgtggccggcgatatgcgcatcgcttttttcccattgcttccagcgatcctctgattcccagcgaatcatgacaacaacttcctcatcaccgcggcgtacgtttttctcaagcactgtcacatcaattaaaccttcttgtttttcaatgattccttcagcgctgaaacgttctatgactttatctgcaaagccttcttttaccgtcatttttctcaactgaacaaacattcgtctcactccaatcattctcacatatgaataattgtaaatgaaattcattctcattgtcaaagaaagcgcagggcggaatcgaaccgccgtgcgcaacagtttattcttttaataaaaacacatttccgtcttcgtccttaaattgaacgaaggtgccccactccatttgattgggctcaccgagaaattctacaccgtttgtcttcattttctcgtatgtaccaaagatgtcttcgcattcaaacacaatagaagccttcatttgctctgagcctttcatcatggctttcgggtaaatgactaaacgagtctcggctccttttggcgcaacctccagccagcttgcttcaggtcccattgggtggtccgctgcaatatcaaagcctaccttctctgtccaaaattgcttcgctttctgctggtcctcgacatatacagcaacagtgccaatttgtttgatcatagggaaacctccaagttgaaaagataataatactataacctgtttacggccgaagtaacataaaaaaatcagccgggaaaccggctgatttttaaaatgagcagctgacaacatcgatgtgatttgtgtctaaggcgaaataaacccagcggcgccgtgaggaatcccaataaaagccgccgacggatcttctgccaaggatgatcgggtaaaaccaaaatgagcggccattggttaaccaaacataggtaaatcggaaaaggcaaggacgaatggtgattggttcaactaacaaaacggctccttgagaaccctgcggttttgggggtttcgctggtatttgggaaggaggaggtccctgcggcgcaccgccgaagcctgggctggcaccgctgccaataccagggccggagccgccgccaaaacctggaacagcgccaccgccaataccagggccggagccgccgccagagcccggaacagcaccgctgccaatgccaggccatggatatcggtattcatattcaaaagcaggccaaggctcataaaaatgccccgcaaacatataaggatcaacataatacatgtgataacgtcctttctcattgtaaactgtacactgcagtttatgcgggcggactcttattggtgcattcgcctaaggatatgaagctggaatgctctcaaagagcagaatcatttgatttttctctagtcttattcacaattccgatttatcattttataatgaaagtgcttctattacgaaaaaggagacagaccgtgaatatcgatcaattattatatcaatatatcatagacaacactgcggatattactgagaaatggttcagtttgcgttgccagctaaaaggcgagctatattccgccagccatttaagtgaagaaacgaaaacacttttaaccgagcagcatacatttaccaatataacaatcgcaagcgcatttctggaggatcaaaccgattttcaagacaacatgacaaaatgggcggaaaacgttgcgaaaaacagggtagagcaggatgttcaagttcatgaggtcgtagaagccatatccaactctagaatctcattctgggacgcagtcgccacatttataaaagagaatcaggagatcgtgacaaatgaggatgcagaccgatggaaccgcattgtgaatcagtcgttcgataagctgattattgaattctctgagcagtaccaaaaattcatgctgatgaggctcacatctcagcaggaactgatctcagagcttggctgcccggtcatttccattgccgatggaatcgggatattgccgcttatcggctccattgatacaaaacgggcacaggtcattttagaaacagtgccggtccgctgtgtcgagagaaaaatcacaagcctcgtcgttgatctttcgggtgttccgattgtggataccatggtggctcagcaattgtacaacctgtctaaaacgcttttcttattaggcgtcaaagccgtattttcagggattcgcccggatgtggcccaaacatcgattcaattggggcttgattttagtgaatatgaaacgtacggcacgctgaagcaggcattagaaaatatgggtgtccgctgtattgttgaggaattggaagaaaacaaataggaagtttccaggcatatgattgtccgtcaccgggtgatcatatgcctttttgatttgaacagaaatcaccattgatttatcaaaaaaaacataatattataattcttataagaatactgtgaattaaaacctattcaacagggggaaggtcttttggtttcaaaatcaacgattgatccggaagtgattgaaaaaatcatcagctcgctggaaacactcgatttcggcaccgttcaaattacggttcatgattctcagattacccaaattgagaaaatagaaaagcaccgtttttcgctgaaaaggaaagaatcaaaatgataatgtaaagggcgtttgttttcattaaattctccttaaaacatatacatatttcatccaatttttatataatagacctttaagatcattttttaggaggatttttgacatgcaagctacggttcacgagagtaagcaatcgatcatgcaacgcattttgacagtctttgtctttactttgctgatcgcgactgtcggcctttttatcggccaatttgttcctgtcgctttgatgctgccgctttctattcttgaagtggtgatgattattctggccttctggatgcgcagaagaaaagcggtcgggtatgcgtttgtatatacattcgcgttcgtttccggcattaccttatttccgatcgtcagccattacgcttccatcgccggcgcctatgtcgtgcttgaagcctttggttctacatttgtcatttttgccgtcttaggcacaatcggcgcaaaaatgaagaaggatttatccttcctgtggtcatttctgctggttgcggtgctcgccctcgcagtggtagggattttcaacattttcagcccgttaaactcagcggcgatgatggcgtattccgtgatcggaaccatcgtcttttccctttacattttgtatgatttgaaccaaatcaagcaccgccacattacggaagacttgattccggttatggcgttatcgctgtacctagactttatcaacttgttcatcaacctgctccgcttcttcggcattttgagcagtgatgattaatgaaaaagcgtctgtcattggataggcgctttttgccatacatcaaaaaggcaggtggagtattggtgaaaaaacaaatgggcgcatatgtatctctggcagcagctatggcgatcgtcggcagttctgtcgttgtcggcaagctgatggtcgaacggattccggtctttctttcctcaggattgcgttttttgatcgcttctgtcgtattgctcatgctgctgttttgcattgaaaaagggtttccggctttgacgaaaaaagatgtgttcgtattactggtgcaatcattcacaggcgtgtttttgttcagtatttgcctgctgtatggggttcaatatacgacgggaacggaaagcggcattttgacaagcacaacccccatggtgatcggtattttatcctttttcctgcttagagaaaaaattgagaaaaagacgctgatcggcattttgctggcggtttgcggcgtaatggcgattaatttgtttggagccgggagccaagacgggacgccgcacgccttattcgggaacatgctgatcattgctgcagtcattggcgaagcgttgtttacattgatggccaagctgctatccccgcatatttcggcactggcgatttcgaccttcgtatcgctcttcggcttcctgttttttctcccgtttgctttgtttgaggcctcttcatttgattacagcgtgccgactgttttggattggtcgtatgtgctgtattacgcgctttttgtcactgttttggcgttttacttatggtatagcggggtgacgaaggtgccggcgggtgtatcgggcattttcacatccgttcttccggtctccgctgtcattttgtcaggcgtgatattgaaggagccatttgagtttgtgcatttcatcggcattgcatgtgtcatcggcggcatatttgttacggtcataaagaaaaaacagccggatgcgtatccggctgcagaagaaaagacgctatagcctgtccggatcggacgggttttttagtctttaaacacgctcagcctttcaaaaagatcaccaagcatcttcacgaacatgtctttttcctcgtcgctgtagttttccatgacagcggatattttgctgaaatggccgggcagaaattgctccaggcgtgctttgccttctgttgtcagttcaatgctgatttttcgtttatcctctgtgtgatgcctgcggctgacaaaaccgtctctcgccagcccgtccagcaggcctgtaatcgtcgctttcgtgacgtttgactgtttggcaagctctgtcggacttaacctatgatccttggcatcaaagagcagcatcagtattttgaattttccttctgacagccctcggccagcaaagtaatgctccatcacatgattcattttttttgaaatatcaaaaagagataaaaacaattcaagagagccggcgtcaatattggaatacgtttcggcgtgctctgttatatgcttatatttcggtaaatgttttaattccatcgcaagtagctcccgtacattcgttgtgacacgattataaaggagggaaaaccataacgcaacttggcttggagatgattgacagcttttcttgggacatagtaaggtaatatagttaggcgcctaactaatacatatagagctgaaaaggtggttattgatatgaaacatatgttaattgcaggaggcggcatcggcggcttgtcagcggccatttctctccgtaaggcagggttttccgtcaccttatgtgaagcggcttcagaaaaccgaaaaacaggtgcggggattcttcagccgcaaaacgcactggcggtgttgaaagaactgggcgtattcgaagagtgctgtaagcacggctttcaaacagaatggtttaaaacgtttgatgaacaggggaatttgctgtttcaagtcagtgaatcctttttagacgattcacttccgggacgcaataatatcctgcgcaaaacgttaaatgacattctcatgaagcatgccgaggcagtgggtgtagacatcaagtgggggaaaaaggttgtcgcttatcaagaaacagctgaatcggtcactgccgtatgtgaagatggagaaaaaatgcaggctgccattctggcgggctttgacggcattcactccgttgttcgcgatataatgctgcaaaaggagacggaaaaagagcatctcggcatgggagcgtggcgcttttatatcgaacttcctgatcacacatttgaggacgcgacattgatgtacagaagcggagacacacaaatcggggtggtgccattggcacaacacgctggctatgtcttcgtcctccagccttgcacgagcgattactgggatgaggaagatacccggtttgatagagtaaaagagattctttctggttttcgggggctggattttgtcacaaagcacatgtcaaaacagcatcctgtcatctttaacaaactggagcaggtcgccgtgcaggagccatggcataaaggccgcgttgtcatcggaggagacgccgcccacgccggcgcgccgaccctggcgcaaggagcggcaatggcgatcgaggatgccatcgtcctcgccgaagaactccaaaaccacgccgatcacgaaacagcattacaggcgtactacaaaagaagagccccacgagcgctcaaagtccagaacctatcatcggaaatcgtccgccgcgggctgaaaggagagccgggagcggaagaactgattggggagtgctatgcggtgttgagggaagggtattaaataggaaaagtccagaaagtgatttctggactttttagtcttgctctgttttattccttatccgctcaatcacctcatgcagcccctcaggcttataaaactccaccggtgaactgcctttctcaaacgaaatcgtctcggcttcaatcagcgcgacatagcgcccgtttacttttgcgagatgaatagaatcgccaaaatccgctagcaatcccttaatctctgtttctccgactttcattttcagctgggcctctggcgtgtgctcgatgatttgggcggaggcttcgatgacttgatgggtgtcgaggcgctcttggatttcccgtttttcgcttgcttcccaaatctcaatgtcgtgctcgaactgcttgagttcttcgctgttgtcttcaaatgtctcgtagacgtgctcctgtaccatgttcatgacctggtttttcatgatttccggcatcgattctccgtactcgacgaatttcagaaagtcctcaaaatagcgggcgtgcgaggcctggtggattttcagttcaccttcctcgaccattccttcctctggcatgtacgggtattggatgcttttcatgttttttgtcgtgatcgccatttcgacttttttaatgagagaagacgcgtcagagatgcgggcgaccttcggctcaaaatcacatttcataatgaagacaaatgactcgtcaaagtattttctcggcacggccgaagcgacgagaaacacgccgccgcgaaccgcgcttgtgtcaaggtacgtgcggacgaactgctcgctcagctcattgaagtcttcttttgtttccgccagacgcgcgcggttgaacatgttgtagtttgggttggaatcgagctcgtggccgggctcgacgataaaatggccgattttcgtcggcacctgctcggactgcggatggcggtctgctttccgtttaacgatttttttcagttccccgtcgagaaagtccttcagctcgctttcttcaaattcgcccgtatcaagggtctggaagtgcttgaactgcttgttcgcctgctcatctttgccttccacctgtatgacataaaaggataaaaaccgaatttcaaaatccatatataaactcaccttattcgcgtattgtacagcttctcaagtatagaaaaaacagcgatcatgcgtcaattgggagaacggaataatcatgaccatgaaagggaaatgtagtcaaatagaaggcatctcatacggaaaggaatggttcgatgaaggaaacaagcccgattcctcagccgaagacgtttgggccgctcggcaatttgcctttaatcgataaagacaagccgacgctttcgctgatcaaactggcggaagaacagggcccgatttttcaaatccatacacccgcgggcacgaccattgtagtgtccggccacgaattggtgaaagaggtttgtgatgaagaacggtttgataaaagcattgaaggcgccttggaaaaggtccgcgcgttttccggtgacggattgtttacgagctggacgcatgagcctaactggagaaaagcgcacaacattctgatgccgactttcagccagcgggccatgaaggactatcatgagaaaatggtcgatatcgctgttcagctcattcaaaaatgggcaaggctcaatccgaatgaagcagtcgatgtcccgggagatatgacccggctgacgctcgacaccattgggctatgcgggtttaactaccgctttaacagttactacagagaaacgccccacccgtttatcaacagcatggtgcgggcgcttgatgaagcgatgcatcaaatgcagcggcttgatgttcaagataagcttatggtcagaacaaagcggcaattccgccatgatattcaaacgatgttttcgttagtcgacagcattattgcagagcgcagggcgaatggagaccaggatgaaaaggatttgctcgcccgcatgctgaatgtggaagatccggaaacgggtgaaaagctcgacgacgaaaatatccgctttcaaatcattacgtttttgattgccggccatgaaacaacgagcggcctgctttcctttgcgacttactttttattgaagcatcctgacaaactgaaaaaggcgtatgaagaggtcgatcgggtgctgacggatgcagcgccgacctataaacaagtgctggagcttacatacatacggatgattttaaatgaatcactgcgcttatggccgacagctccggctttcagcctttatccaaaagaagacacagtcattggcggaaaatttccgatcacgacgaatgacagaatttctgtgctgattccgcagcttcatcgtgatcgagacgcttggggaaaggacgcagaagaatttcggccggaacggtttgagcatcaggaccaagtgcctcatcatgcgtacaaaccattcgggaatggacaacgggcctgtatcggcatgcagtttgcccttcatgaagccacacttgtgctgggcatgattttaaaatatttcacgctgattgatcatgagaattatgagcttgatatcaaacaaaccttaacacttaagccgggcgattttcacatcagggttcaaagccgtcatcaggaagccattcatgcggacgttcaggcagttgaaaaagccgcgtctgatgagcaaaaggagaaaacggaagcaaagggcgcatcggtcatcggtcttaacaaccgcccgcttctcgtgctgtacggctcagataccggcaccgcagaaggcgtcgcccgggagcttgcggatactgccagtcttcacggcgtaaggacagagacggcacctctgaacgaccggattggaaagctgccgaaagagggagcggttgtcattgtgacctcgtcttataatggaaaaccgccaagcaatgccggacagttcgtgcagtggcttcaagaaatcaaaccgggtgagcttgagggcgtccattacgcggtatttggctgcggcgaccacaactgggcgagcacgtatcaatacgtgccgagattcattgatgagcagcttgcggagaaaggcgcgactcggttttctgcgcgcggggaaggtgatgtcagcggtgattttgaagggcagcttgacgagtggaaaaaaagcatgtgggcggacgccattaaggcattcggactggagttgaatgaaaacgccgataaggaacgaagcacgctaagccttcagtttgtcagagggctgggcgagtctccgctcgctagatcgtacgaagcctctcacgcatccattgccgaaaatcgtgaactccagtccgcagacagcgatcgaagcactcgccatatcgaaattgcattgccgccggatgttgaatatcaagagggcgaccatcttggcgtattgccaaaaaacagccaaaccaatgtcagccggattctccacagattcggtctgaagggaaccgatcaagtgacattgtctgcaagcggccacagtgcggggcatctgccattgggccgtcctgtcagcctgcatgatcttctcagctacagcgtcgaggtgcaggaagcagccacaagagcgcaaatacgtgaactggcggcatttacagtgtgtccgccgcataggcgcgaattagaagaactgtcagcagagggtgtttatcaggagcaaatattgaaaaaacgaatttccatgctggatctgcttgaaaagtacgaagcgtgcgacatgccgtttgaacgatttttagagcttttacgtccgttaaaaccgagatattattcaatttcaagctctccaagagtgaatccgcggctagcatcgatcacagtcggcgtcgtgcgcggccctgcgtggagcggccgtggcgaatacaggggcgtggcttcaaatgatttagctgagcgccaagccggtgatgatctcgtgatgtttgtacgcacaccagaatctcggtttcagcttccagaagaccctgaaacgccaatcattatggtcggacctggcacgggagtcgcgccatttcgcggtttccttcaagcccgcgatgttttaaagcgggaggggaaaacgctcggtgaggctcatctctattttggatgcagaaacgatcgtgattttatataccgcgatgagcttgagcagtttgaaaaagacggaatcgtcactgtccacacagccttttcccgcaaagaaggcatgccgaaaacgtatgtccagcatgtcatggctgaccatgcagaaacgttaatatcgatccttgaccgcggaggcaggctttatgtatgcggtgacggcagcaaaatggccccggatgtggaggcggcactgcaaaaggcgtatcagtctgtccatggcaccggggagcaagaagcgcaaaactggctgagacatctgcaggataccggtatgtacgctaaggatgtctgggcagggatatagataaagaagactggagacatccagtctttcagcgtgtcggcaaaccctcgcattcgttgtcaggactgcgcttcggtgctcaatgcgaagtggatcaacggctaaattctcaggcgtcctgcctaaacgccgtcgtcatcacatcctgtgaatatccgctcctatgctcgtccttcctagacttcaagggttttcaatcacgctgaaaagatgacaaaatcctaaaatggttttcattttaggattttgtcaacaatctggaagactggagacatccagtcttttttgtcctttcgaaaaaatggtgatcgcgctaaacattgatgcatacaataacttcagtccgccggaagggcgggctgtctgcaaaacctatttttcgtttttgctagtttatgttattcttatactcggtatctatttcttttttcaaaggcacacatgacaaaagaaatcctttttttatttcggagaaaaaaatgtgaaacgaaatgaaggtttctttcgtccagtgattggtttccaaatggttgtaataaaaatgatatggtgcgtaacataaatattccggcttgccgcggtgtatttcttgttgtgtgatgccttgattttgtttggaaagaaggaattggaaggcaggatataaagagcaggtaaatatgaatgaagaacttaaagtgtttaagaaagtagaggttgccatgaagaaacttttttcttacaaacttagcttttttgtgctggctgttatactgttttgggcaaaaacgtatttatcctacaagactgagtttaatcttggggtaaaaggcacaactcaggagatcctcctgatatttaacccattctcaagcgccgtcttctttttaggactggctttgctggcgaaagggcgtaaatcagccattattatgctgattatcgatttcttgatgacatttgtgttatatgcaaatattttattctatcgtttctttgacgatttcttgacgttcccgaacattaaacagtctggaaacgttggaaacatgggagacgggattttcagtatcatggccggtcatgatattttctatttcttagatattatcattttgattgcggtattgatctggagacctgaattaaaagaatacaaaatgaaaaaacgctttgcatctttagtgatcctttctgggatcgcactgtttttcatcaacctgcactatgcggaaaaagaccgtccgcagctgctgacaagaacgtttgaccgcaattatattgtgaaatatttaggtttatacaactacaccatttatgacggtgtacagacggctcaaacagaaacgcaacgggcctatgcaagcagcgatgatttaacaagcgtcgagaattacacgacgtctcattatgcgaaaccgaacgccgagtacttcggctctgccaaaggcaaaaatatcattaaaattcacctcgaaagcttccagtcattcctgattgactacaagctaaacggtgaagaggtgacgcctttcttaaataagcttgcgcacggcggggaagatgtgacgtattttgataacttcttccatcagacaggccagggaaaaacatctgatgccgagctgacaatggataactcgatcttcggtcttcctgaaggctccgcgtttgtgacgaaaggcgaaaacacctaccagtcgcttcctgcgattttagaccagaaggaaggctatacaagcgccgtcctgcatggtgattacaaatcgttctggaaccgtgaccagatttacaaacatatcggatacgacaagttctttgacgcaagcacgtacgatatgtcggatgaaaatgtgattaacatgggacttaaggataagccgttctttactgaatcgattccaaagcttgaatctcttaaacagccgttttacgcgcatttgattacattgacaaaccattatccgtttaacttagatgaaaaagacgcgtctcttaaaaaagcgacaactggcgataacacagttgacagctacttccagacagcgcgttaccttgacgaagcgcttgagcaattcttcaaggagctgaaggaagccggcctgtatgacaactcagtcatcatgatttacggtgaccataacggtatttctgaaaaccataaccgagcgatgaaagagattcttggaaaagagatcacagattatcaaaacgcacagaaccagcgtgtgccgctgatgatccgcgttcctggcaaaaaaggcggagtgaaccatacgtatggcggcgaaattgacgtcatgccgacacttctgcacttagaaggaattgattctcagaaatacatcaactttggtactgacttattctctaaagaccacgacgatacagtggcattcagaaacggagacttcgtaacgccgaagtacacatcagtcgacaatatcatttacgatacgaagacaggtgaaaaactgaaagcgaatgaagaaacgaagaatctgaaaacaagagtgaaccagcagctgagcctttcagacagtgtcctgtacaaagacttgctgaggttccataaactaaatgatttcaaagctgttgatccgtcagactatcattacggcaaggaaaaagaaatcaaataagatgaaaaagagccttgagcgggcgcattgccttcgctcaaggctctttttttggttatacaaccaacttgaaaaaatagattccatttggtcaccaaggctggctttctctcatatcattacagtagattttgaaaccggattgaaatcggacaaattatcggggaaatgccttgatagattgtgaagatgtaccaggtttcgaactcaatattcatagagatgaggggtagagatgaaagcggtcattctctgcggcggaaaaggaacgagaatgagtgaagtcacgaatgacattcctaaaccgctcgccatgataggcggcaaaccgattctatggcatattatgaaaatttatcagtactacggagtaaacgagtttattctgcttttgggctataaaggagaaaaaatcaaggaatactttctcgactatgaatggaagcacaacagcctgacactcgacagctctacgggagaggtacagatgctgggacagcctgaaacgtggaaaattacgtttttggagactggggaagatacgctgacagccggaagaatcttgcaggcgaaagactatatcggtgatgaaacatttctgcttacctatggggacgggctggccaatatcaatcttttccatctcatcagctatcatcagacaaaaggtgctgccgcgactgtcaccggcattgacaaagtctcgcagtttggcaccttgacggttgaggacggcatggcgaaaacattttctgagaagacatcaagtgacggaatcatcaacggcggattcttcgttctcagtccaaaggttttcgagtatttgccgaaggacgggaacgcgatgttcgaagatgaaccgctgaagaaccttgccaaagacggggagcttgctgtgtaccgccattacggattttggacggccatcgatacgtataaaaatctcttagaagtcaacaaaatgtggaatcaaggacaacaagtatggaaggtatggtgaatcgatttgagtttctggaaaaataaaaacgtatttgtcacgggatccacaggtcttttaggaagctatttggtgaaagagctgatcgatcagggcgcaaacgttacggggcttgtcagggatcatgtgcctcaatccaatctttatcagggagaacatatcaagaaaatgaatatcgtgcggggctctcttgaggacttggctgtgattgaacgcgcgcttggcgagtatgagatcgacactgtctttcatctcgctgcacaagcgattgtcggcgtagcaaaccgcaacccgatttctacctttgaagcgaatatcctcggcacctggaatattctcgaagcctgccgcaagcatccgttaattaagcgggtcattgtcgcttcaagtgataaagcttacggcgatcaagaaaaccttccatacgatgaaaacatgccgctgcaaggcaagcacccgtacgacgtctcaaaaagctgcgcagatctgatcagccacacctattttcacacgtacgggcttccggtctgcattacgcgctgcggaaacttatacggcggcggagatttgaacttcaaccgcatcattcctcagacgattcagcttgtgctgaacggggaagcgccggaaatccgaagcgacggcacatttgtacgggactacttctatattgaagacgccgttcaggcttatctgcttcttgcagaaaaaatggaagaaaacaatcttgccggagaggcctttaacttcagcaatgagatccagctgaccgtacttgaactggtagagaaaatattaaagaaaatgaacagtaatctgaaacctaaggtgctgaatcagggaagcaatgaaatcaaacatcaatatttatccgcggaaaaagcaagaaagctgctgaattggacaccggcctacactattgatgagggacttgaaaaaacgattgagtggtatacggaattcttcaaaaagtaatgtgaaacgaggtgaacaagactgtgaccagcgcgtattgcaccgttttatcaaaaggaagattatatcaggcagtcgctttgtttaagtcgttagagcaagttgatcaagacagtcccatttttatactttgcatggatgaagatacgcaccgcgtgttacagaagctgaagatgaagcagctgaaccttgtgccggtggccgctcttgaaaatgaattgctgctgaagctgaaggaaactagagatcaaagtgagtattgctggacgatgaagccgatctttctgcaagctgtgctgaacagcaatcccgagctggagcgcgtgacgtatattgacggggacctctttttctatgcagatccatcgccgatttttgaaaaccagccggactgctcggtgctgctttcacggggggatattgtaatcccttcttttgagaaagagcagattgacatgctgcagcgtcttttaggcagatataattccgggtttatcagcttcaagcatgatgatgcaggcacggattgcttggagtggtggaaggaacgctgtcttgaggaatgcaaaaatgcaccgggtgaagggaaattcggtgatcagggctatttggattatatgtctgagctgtttccgaatgtgtgtgacattacaacacccggcgtgaacatcggccattggaattatggacagcatacgttttcctggaaagatggccggatcgtgctggaggatggcagtccgctgatcttttatcatttcagcggataccgaatcgtcagcatcaatgaaatcaaacagattcatgaaacaacccgcacagatctgccgtttgtgcatgaactgtatcaagagacactgccgcatatcattcagcacatgaaaacgttagaccctgaatttaacggttttgcttcaaaagatgacaacaaataaatgagtaaatacaggaagtgaaaatgaagtgaaagcaagcgttattattcctgcatataattcaaaggagcgtctttacaacagccttctgtcattaaaccagcaggagtgcgatgaagaattcgaagtcattgtagcggacaatggctctgaggacgggacgctctcgatgcttgagtcatttcaagctgattttccgctgatctttacacggattaaagaaaacaggggcattgcgtacggacgaaatcaggcgcttcgcaatgccagaggagacatcctgattttccatgacagcgatatgcttgcggcaaaggaccttgtggcaaaacatattaaagcccatgagaacgaagagaatctcgtcgtgtgcgggttgttttggaaacggatctacagtttttactatgaacggtttgaagaagaacataaggaacagctcgcaaagctcacaggtgaaatgccgaagaaagacaaacaaaagctgctggaggaagcggacatcaaaaacggaagctttcttgataaaagctttgacctcgataccgactttatagacgtgctcaagaagattttagatgagtacggcgatgacttgaaaggctatcatatgccatggcgcttttttatcacgaataattcctctgtgaaacgcaagcatgtggttgacctcggtttatttgacgaaggcattgtgcggtacgggtttgaggattatgacctcgggatcaggcttcatcaggccggattgaccttcaggcttcgccgtgatattgtcagtgttcatcaggaacatccaagcaattgtaagtctgtagacgatattcgggcaaacattgcctatatgtgcgataaatacaataacatccgctccttagacgttcatctcgcttttaatgggccgttcccgcctgacatgacgaacagaatcatggctgatattcaaaagctgctggaatcacagaaatatgatatgctgctgaatctgtttcttgagcttctgcatgttgttaaagagcgcaacattgatccggattggcgaaagaaatccccaagggtgacggcgaaaagctttgatttacaaactgtccgcaagcttctgcctaaggcgaagaaaaagctaggcgtgaacgattttgccaacgcactgtatgcgcttgtcaacgatttgctgcacgtggatcttagatcattggatgtggtataagtgagtacatttcatttttcaacgatagtgtcaaggacacatatctttaagctcatgcctatgattcattctctccatgagcattgcgatgattttcatttatatgtgctgtgtgtcgaccagaaagcgtatgaattgcttcagcacgtgccatgggagcatgtaacctttgtgcagctgcatgaaatggaagacccggagctgctgaaagcgaaaagcaacagaacgtttcatgaatattgctggacgttaaagcccgcctttttgtttcatgtgatgagcaagtgggatgacgctgaatactttgcccatatggatacggatctatttttcttttctgatccggcacgtatttttgcagaaaacccaacggcgtctctgtatttgactgatcatcgtaattcgccgcgcttcatgtcctactacgaccgaaccggacgctttaatacaggctttgtcggcgccggtaatacaaaggaagcatatgaagcggtgtggcagtggagacaggactgtattgaattttgcacggtcgaaatggatacggaacgaaagacatatggtgatcaaagatatgtggagaaatggccggagcagtttaaaggtgttcatgttgtcaaatccataggagccaatacagcgctttggaatatcgaaaactataaggtcgggcaaaaggacggccgcgtgtatatagatgaaacgccgctgattttctatcatttctctgggtttacgctggtgacagaaaaagagtttaatctttgctggtactaccggattgaagacgaagcgacaattaagatgatttatatgccctatatattaaatctgaaaagatggattgatgaaatacagtcggcgtttccggactttgcggatggctttatcccgaagcacgcagtgcctgacactcattttatccagctggattaaaaaaccccctgccgcctggcaggggttttttcagctatgccattctctcagcttctggtcacttggcaataggaaggcaaggatgccgaggacagggagaaaggcaatggcgatcatcgtcggggtcagtcccgcggcatcaatcagagcgcccagcgccacagcgccgattgcgcccatcccgaaggcaagcccgacggttaaaccggacattgtgccgatttttccaggaactagctcctgtgcgtagacgaccgttacagaaaagctcgacatcagaaccaagccaatcaatgcgagcacgccgtaggcgagaaccgggccggcaaatggcagcacaatcgccagcggcgccgagcataacagcgaaccgaggataacgaagcgttttccaaaacggtctgcaagcgggccgccgagaaacgtgccgatcgcgccgaacagcaagaagacaaaaatatagctttgtgcctgctgaatgcttacgtgataggtatccatcgcgtaaaacgtgtaaaagttaccgatcgcactcgtataccaagaacgagcaaaaatgagaaatataataataataagagcagatacaacagatttggtgatggccgtgttttcagccgttttcttttgcttgcctgatttctgggcaaggctgccgagacgtgaggcgtaccatttcgcaatatacatgagaaacataacagcaagcgcggcgacaagcgtgaaccaaacagcgccgaattgcccgagcggcacaaggatcagcgcggtgatcagcggtgccatcgcctggcctgagtttccgcccacctgataaatcgattgggcgagcccgcgttttgtgccggcggccatatacgccacacgggagccctccggatggaaaatggccgagcctaatccaatgaaaaacacacagcataagatcgttatgaatgacggggcaaatgcaaggcccaaaatgccaagcatgctggcggtcaaaccgactggcagcgcatacggccgcggccgtttatcggtataccagccgacaacaggctgcatgacggatgacaccatgtttaatgtgaaagcaatgatgccgagctgtgtaaacgtcaggctcatggagcgttccaaaatagggaacatggccggaatcacagcctgaagcgaatcgttgagcatatggcaaattccgataataatcaaaatcggatacaccgtggtgcctggtttttgaactgttttttcttttaacggggcggcgatagccattgagtctcctccttacatatataaccaaagcataccaccatattattcataaggtgaagaatttatcaagaggaaaaaagattcttatgaaagaaataccgtcagcctgattagcagctgacggtattttcgatattcaaaatgtgatatagctcttcaagcttacgaatctcataggttggtatgatctctggcacattcggcttcatgtcagggttcatccagcaagtatcaagcccggcgagctgtccgcctttgatatcagcagttagtgaatccccgatgattaatgtgtgctctgctgaaaattgaggaatccgttcaaacacgtaattgaaatattccttcatcggcttttggaagccggtgtcttcagaaacgaaaatgtccttgaagaatggaaataatcctgaatcacggagacgcttatattgtgtgtgagacacgccgtttgtcacgatgtacaaatcaaactgttgctgcagatttgagatgagatcaaatgcaccgtcaataagctgatgtccttcttcaagaaagcggcggtatttttgctcaagcaaagcgccgtccgcttcgtaaccgtactccttgagcaaagcggaaaaacgtgtgtttacgacttcatcccgtgtcatcttaccttcttcaaaggctctccagagaccttgattgatggttttatactgcgccttcatgtcatttgttaaaggaatgttctgatcttcaaacagcaaacgcagggctaaagcttctgccgcttgaaaatcaaggatggtatcatctacatcaaataataaagtgcggtatcgcttcatctgtgtgtctccctttctcatatgtattcaaagtatagcacataaaaaaaggaaaaagccggcgggtgaggcaccgccggctgaaaagagattatttgtttaataagctgtgttttctcgaatataggaagtaaaccagcgttccgacagcgatccagatgacaaatgaaagccatgtgacgccgggaaggctgtacatgaaccaaaggcagatgcctgcgctgataatcggcacaaccggaacgaatggcactctgaaggacgctttgatttcaggatgtttctttcttaacacaatgacagcaatggaaatgaccgtaaacgcggcaagtgttcccatgttcaccagatgggccagcgttccgaggttaataaagccggcgattcccgctgcaacgatccctgtcagccatgtgttgcggaacggggttttaaatgacggatgaacctttgcgaacaatccaggcagaaggccgtctctgctcatggcaaatgtcaagcggacctgtgcgtacagcaaagcgagcatcaccgtcgtaatcccgataatcgcaccgacagaaataattccggcaacagcgtcctgtccgacgaatttcagcgcaaaggatacaggatctccgacattcaatttggcataaggcatcatgcctgtcagcacaagcgataccgcgatgtacagaaccgtacagacggctagagctgaaataatgccgacgggcatgtttttttgcggatttttcacttcctctgatgcgttagaaaccgcgtcaaacccaaggtacgcgaagaatacagtggcagcgctaagtatgacgcctttcatcccgaatggcataaaaggagaccagttatccggtttcacatagccgatgccgacaataatgaacaataatatgatcgcgattttcatcagtacgatgacgttgttaaagcgtgtgctttccttgacgcctctgctgacaatcgcagtgatgaggagaatgatcaccgcagccggaaggttaaatacggcgcccgccgtgcttcccggcgctcctgtcagtgcagccggaatatgaagattgaagccggcaagcagtgattgaaagtatgaagaccagccggtggcaaccgccgacagtgcaatgacatattcaagcatgagatcccatccgatcaaaaaggcgagcagctctccaagtgtcacgtatgagtatgagtacacgcttcccgaaatcggaatggaagacgaaaactcagcataacagaaagcagccagcgcacaggcgagccccgctaaaataaacgatatgatgagggcgggacctgcaccggtcgctgccactgttcctgtaatgacaaaaatccctgtaccgatgacacaaccgataccgagcaaggttaaatcaaatgcgcttaacgtacgggcaaggctttttgacttgctctgcgcactcaatgtttcaagcggtttttttctaaataatgaactcatcaaaagttcctcctagaaatattcaaaatattctaatcattatatgcagttcttgttgtattatattgtcgaaatttgacgtagtcaataaaatatttttctgctttaaatgatagaagcgaaacagcgttgtcgtatcataggatagtaatttttactaatcgtatattcaattttatgcaagatgaaccgatagaaaaaatagattcgcccatattttgatttgcggttataaaggagatgctgaccatgtttcaatatgaagagttgaataaacagtttatcggcgggaaatggcaggagggcagcagcccaaatgtattggaaaacaaaaatccttatactcaaaaaacattcacaacattccgtaaagcgactgctgacgatgtagatgaagcgtatcgggcagcggcgctggcaaagaaaaaatgggatgcggtcaacccgttcgagaaaagaaccattttagaaaaagccgtcacgtatattgaagaaaatgaagaagccattatttatttgattatggaggagctaggcggtacaaggctcaaagcagcttttgaaatcggtcttgtcaaaaacatcataaaagaagcggcaacgttcccaatccgcatggaggggaaaattcttccgtcaacaatagatggcaaggaaaacagattatatcgcgtgccggcaggcgttgtcggtgtcatcagtccgtttaacttcccattctttttatctatgaaatcagtggcgcctgcactcggagccggcaatggcgttgtgctaaagccgcatgaggaaacgccgatttgcggcggaacgctgattgcgaaaatttttgagaacgcgggaattccagcggggctgctgaatgttgttgtcacagacattgctgaaatcggcgacagcttcgttgagcatccagtgccgcggatcatctcatttaccggttctacgaaagtcggcagctacatcggacagcttgcgatgaagcattttaaaaagccgcttcttgagcttggcgggaacagcgccttcatcgtacttgaggatgcagatatagaatatgcggtcaatgcggcggtgttcagccgatttacacatcaagggcagatttgcatgtcagccaaccgcgtgcttgttcattcttctatttatgacaagttccttgagctgtaccaggcaaaagtggaatcgctgaaagtcggcgacccaatggaccctgatacgattatcgggccattaatcaacagcagacagacggacgggctgatgaagactgtagagcaagcaattgaagaaggcgctgtaccagtgaagcttggcggatttaacgggacgatcgtggaaccgacgatcttaaaagacgtcaaaccgttcatgagcattgccaaggaagagctgttcggaccagtcgtctcctttatgaagtttgattcagaagacgaagcggtggatatcgcaaacgaaaccccgtttggcttgagcggtgccgtacatacgtcaaatcttgagcgcggcgtggcttttgcgaaacgcattgaaacaggcatgattcacgtcaatgacacgaccatcaatgatgaaccgaatgtagccttcggcggtgaaaagcaatcaggcctcggccgtttaaacggtgagtggagcctcgaagaatttacaacgctgaaatggatctcggtccagcacgaaaaacgcagcttcccttattaatgaaaaggagtgaatggaattgaccataaatacggaaaaagaaaccgcagatattctggacgcatttatcaaagtagccccttatttaaacagcctggttcaggatgatattacaatcggcatttatgatacggaaaaactgctcgtgaatataccggccaaaaccttttcgctgaacgtaaaagccggcgatccgctgcaggaaggggatatcatcacagatgccatccgcagcaatcagaagaagacgagcatggttccgaaagaattgttcggcttcccattgatcgcgcgtgccatcccgctgcacgacgagaatggaagagtcattggaggcgtcggcctcggaacgagccttgaggagtcgtcaaagctgcatgatgtcgcggaaagcttatcagctgttgttgaacaaacagccgcggctatttccgacatttctgaatcaattaacgggttttcaactcaaatgtcgggcatttcctctcaggcgaaaaaagtaagcgaaagcgccggtgaaatcgccgatatttcagtaactgttaaaggcatctcggaccaaagcaatctgctcggcttgaacgccgcgatcgaagcggcaagagcaggggagtccggaaaaggattctctgtcgtcgcagatgagatcagaaagctagcgacgcattcaaaagaaaatgtcggccaaattgaccagattacgaaaaaaatccacagcctgctgaaagggctggaggaatccattgagtcgattaaccagcatacagacggacaagccgctgctgttgaacaaatttccgccacgatgcaggagatttcaggaagcgcgcagcatcttgcgaaaatggccgaaaaagcgcttgaggaagagtaagagaccggggacaaacatccccggtctttttcttatcctgcatttccatgaaattcgtctgacgttttactagttttattccagcggctgatttaaaatgtacacatgaacttacgtgaggattgataggaaccatgagcatattaaaagcggaaaatctttataaaacatacggagataaaacattatttgaccatatctcctttcatattgaagagaatgagagaatcggattaatcgggccgaacggaacaggaaaatcaacgctgttgaaagtgattgccggcttggaatctatcgaagaaggagaaatcacgaaatccggaagcgtgcaggtcgaatttcttcatcaagacccggagctgcctgcggggcaaacagtgctggagcatatctattccggtgaatcggctgtgatgaaaaccttgcgtgaatatgaaaaagcgctgtatgaactggggaaagatcccgaaaatgaacagcgccagaaacacctgctggcagcacaagcgaaaatggacgcgaacaatgcatgggatgcaaacaccttggcaaaaaccgtattgtctaagctgggcgtcaacgacgtaacaaaaccggtcaatgagctctcaggcggccagaaaaaacgggtggccattgccaaaaacttaattcagcccgctgatttgctcattttggacgagccgacaaaccatttggataatgaaacgattgagtggcttgaagggtatttaagccaatatcccggcgccgtcatgctggtgacgcacgatagatatttcttaaaccgtgtcaccaaccgcatttatgagcttgaaagaggcagcctctacacttacaaaggcaactatgaagtgtttttagaaaaacgcgcggaacgggaagcgcaggctgagcaaaaggaaacgaagcggcaaaacctgctgcgccgcgaactggcttggctcagacgaggagcgaaagcccgctccacaaaacaaaaagcgagaattgaccgggtagagacgcttaaagagcagacaggccctcagtcatcaggttcactcgattttgccattggctcgcaccgtctcggaaaacaggttattgaagcggagaacgtcatgatcgcttatgacggccgcatgctcgtcgaccgttttaatgaacttgtcataccaggtgaacggatcgggatcatcgggccgaacggcatcgggaaaacaacgctgttaaatgcccttgccggccgtcatacgccggacggaggcgatattacgatcggacagacggtcagaatcggctactatactcaggatcatagtgaaatgaacggtgagttaaaagtcattgactatataaaagaaacggcggaggtcgtaaaaacggcagatggcgatatgattacagctgaacaaatgctcgagcgtttcctcttcccgcgttcgatgcagcagacgtatatccgcaagctgtccggcggggaaaaacgccgtttatacttgcttcaggttctcatgcaggagccgaatgtcctgtttctcgatgagccgacgaacgatttggatactgaaacattaagcgttcttgaggattatattgaccagttcccaggcgtcgtcatcaccgtatcccatgaccgctatttccttgaccgcgtcgtcgaccgtttgattgtatttgaaggaaatggtgtcatttcccgctttcaaggctcctatagcgactatatggaggagtcaaaagcgaaaaaagcggccccaaaaccggcagctgaggaaaaaacggctgaagccgagccgaagaaaaaacggaaaaagctttcttacaaagaccagttggaatgggacggcatcgaagataaaattgcccagctggaagaaaagcatgaacagcttgaagctgacatcgccgcagcaggcagtgattttggcaaaatccaagagctgatggccgagcaggcgaaaacggcggaagagcttgaggctgcgatggaccgctggacagaattgtccctcatgatcgaagaactggaaagctaaaaagcgtggccgcagcaggccgcgctttttttcacataatggacaaaaacgaaccggcctgcttatgttaggataaagttgtgtgtcagcggcacatggaaaactaacggagatgatgaagtatgacatgggcgatcgtgatgttaattctcatgagtctggtgaaaatcgtattaacctgtcttcctacaggcgtcatagaatggctgctcggcaaatttgaagtgcacgccaagctgagtgacgaaaatgcgagtctctctctagatggaaaacgcctcgagggtgcagagaagcagaaagtgattgatcaatttaacgaagctatcttcctggaaaaatattatatctatccaggtgatgaagagcgttatttacatccggaaaacggcggcacgcctctggtgatagatacaaaaaaaggaaaaaaagacgtgaagctgttcgtgtaccgctacgacgaccatatcgacgtcgtgaaacagtacaagaagaaagtgatcgcgtatcgagtgctttctgaaagccttcaaaaagagtctctgtcagtggcgggaagtttagcttaaacaggaaagtgaaagacgggtgctgtatgctgctcgtcttttttattgttttttaaaacttaacgtttacgttaaggttcaaaaggtgtataatggtaacagaaacggcgaagggggatttaccttggaatggatgaagattgatcaagtggccaaaagaagcgggctgacaaagcggaccatccggttttatgaagaaatcggcttgattccggcgccgaaacggacagacggcggtgtaaggctttattcagaggatgatatggaggagcttgagaaagtcatcagcacaaaagaggtgctcggtttttcccttcaggagcttcagcatttcatggaaaccagccgccagctagagttaaacaaagaggggtatttgttgtcactggatcctaaggaacggaaagaaaaactggaggaaattcaggaaaccctgaatcaccagctggatttgattgatgagaaaatccgcacattccaaagctttaaagaacgcctgcagggcatgaaaaataaagcggaacgcgccattcaatcaatcgaatgaaaagtttgttaaacgctatttttgtagcgtttcttttaatggaataaagatggaggttaggtcaaatggataagacaacacaagtgaatcagaaaacgggtttgctcagccagccaaaagcggtatgggctgtcgcgtttgcctgtgtgatttcctttatgggaatcgggctggtcgatccaattcttccggccattgccgcacaactacatgcttcacctagtgaagtatcactcttgtttacaagttatttgcttgtaaccggatttatgatgtttttctcaggagccatttccagccgcatcggcgcgaaatggacattaattctcggacttatttttattattgtgtttgcggggcttggcggcagctcaagctcaatcgctcagttagtcggctatcgcggcggctggggattagggaatgctttgtttatttcaacagcgcttgcggtcatcgtcggcgtgtcagtcggcggcagcgcccaagcgattattttgtatgaggccgcgctcggtctcgggatttctgtcgggccgcttgcaggcggagagctcggaagcatttcatggcgcgcaccgttttttggagtatctgtcctgatgtttattgcgttaatcgcgatttctttcatgcttccgaagctgccgaaaccggcgaaacgcgtcggtgtgtttgatgcgatgaaggcactcaaatataaaggcctgctgacaatggcggtatcggcattcctatacaactttggattttttattttgctagcttattctccgttcgtactggatttagatgaacacggtcttggatatgtcttcttcggctggggccttctgctggcgattacgtcagtctttacggcgccgctcgtgcacaaagcgctgggcacagtgcgttcgctcgtcgttctctttatcgcctttgcggccattctcgttattatggggatctggacagaccatcagactttgattattacatgtatcgttgtcgctggtgctgtcctcggtatggtgaatacgatcatgacaaccgctgtgatgggttctgcgccggttgaacgttcaatcgcgtcttcagcctacagctcagtccgcttcatcggcggcgcgctcgccccgtggattgcaggaatgctgtcagaacactttactgcaagcacaccatatacagtaggcggaatcgtcgtttttgtcggcatgcttgtccttctcatgggacgtaaacatcttgctggaattaaggcggggcattaataacgaaagacactgcacagatgcagtgtctttttttaatcgtggaatctccccattactaccgtattgtagtgatttccgtcagaaagcaatttctccttttttaagattccttctgcttcaaatacgtatgtttttatagtgaaatggctctttaatttgtttccaggatattcagtgagatttttttaattccgttggcatccgcttcggtcaggcattgatgcggctgggatttatcttgcagaagctgagaatgtgtccgttcatttacgattgccatttcaagtgatggttcatgctgtagagggaacgtttgccatggataaggcaaagcctgacgaatatgatcataaatgtttagaaacgctctatcaatacatacacagcgtcatgaaaaacagcttttctcggtcgagtggtttaccgcttgggcagatgaggaggattttgagctgtctgccaaaaaagagctgacccttgatgaattcacatctccattgcagctcattttaaaagacagagagcttttgagaatcgttaagaataaacggcagtaaaaaacccgcccttcagcaggcgggtttttttataaattaaagcactttcgtcgtccaagactcgcagttccatgtttctgtcgcgatatccatataaaagtctggctcgtgggaaatgagcagaatggagcctttatattctttcagagcgcgcttgagctcttccttggcatcgacatccaagtggtttgtcggctcatcgagcaccagcaggtttgtttctgagttgattagcttgcacaatctgactttcgctttttcgcctccgcttaatacggagacgcggctttcgatatgctttgtcgtcagcccgcattttgccagagcggcacggatttcatactgcgtataagaagggaattcgctccatacttcttcgatgcacgtattgttgtttgtttccttgacctcttgctcgaaatagccggtatagatgtgctcaccgcgttcaacagagccttcgagcggctggatttcaccaagcaaacttttcagcaatgtcgtttttccgatcccattcgcgccgtaaagggcaattttttggccgcgctccatgcggaggttgagcggacgggacagcggggaatcgtaaccgatcacgagatccttcgtttcaaaaatcagcttgcctgacgttctcgccggcttaaagtggaattccggctttggcttttctgccgcaagctcgatcatatccatcttatcgagtttcttttggcgggacatcgccatgtttctcgtgctgacacgcgctttgttgcgggcgacgaaatccttcagctccgcgacttcctgctgctgctttttgtaggccgcttcaagctgctgttttttcacctcgtagacttccataaactgatggtagtcgccgacataacgtgtcagctcttgattttcaacgtgataaatcaggttgatgacactattcaagaacggaatatcgtgggaaatcaggatgaacgcgttctcgtattcctgcaggtagcgtttcagccattcaatatgctgttcatcaagatagttggtcggctcatcgagaagcagaatttccggcttttcaaggagaagcttagcgagaaggacctttgtgcgctgtccgccgctcaaatcggtgacatctcgctctaaaccgatatcgctcaaaccgagaccgcgggcgatttcttccaccttggaatcaatgacataaaaatcattgtttgtcagcgcgtcttgaatgacgccgacttcttcaagcagcttctcgagctcgtcgggatcagcctcgcccattttgttgtaaatctcgttcatttcctcttccatcgcaaataaataatggaatgcgtctttcaggacgtctcgaatggattttcctttttccagcacggtatgctgatcaaggtatccgacacggacgttttttgaccactcgacttttccctcatcaggttcaagctttccggtaataatattcatgaaggttgattttccttcaccgtttgcgccgatcaaaccgacgtgctcgccttttaacaggcggaaggaaacgttattaaaaatggcccggtccccgaaaccgtggcttaaatcctttacagataaaatactcatgtttacacctctatcgttatcaaacacgcacaatcggcgtgtaatattcactcttttgattataaaggaggattcggaatgttgaaaggtataggaaagaaaaagaaaaattgcgttccgggcgaggttttgagatactatggaatagatttcaggaattgaggagaacaaaatgacgcaaacttggccatttttacataatgcacaatcatttatacaagagaattggaatgcttccggctttcaaacgccaacccctgttcaagagcaggcagcccagctgatcatggacggaaaggacgtcattgcagaatcgccgacaggtacagggaagacgctggcgtatgcgctgccggtcttggagcggatcaaaccagagcaaaagcatccgcaggctgtgattttagcgccttcccgtgagctggtcatgcagatttttcaggtgattcaggattggaaagcgggctcagagctgcgcgcggcttccttaatcggcggggcgaatgtgaagaagcaggtcgaaaagctgaagaaacatccgcatatcatcgtcggcacgccaggcagggtatttgaactgattaaagcaaagaaactcaaaatgcatgaagtgaaaacgattgtacttgatgaagcggatcagcttatcctgccggagcatcgcgaaacgatcaaacaaattattaaaacgacattaagagaccgccagcttctatgtttttccgcgacactcaaaaaggaaacagaggatgtgctccgcgaattggcgcaagagcctgaggtgttgaaggtacagcgaagcaaggcggaggcagggaaagtgaaacatcaatacctgatttgcgaccagcgcgacaaagtgaagctgctgcaaaagctgtcaaggcttgaaggcatgcaggcactcgtatttgtgagagacattggcaacctgagtgtatatgcggaaaaactggcatatcaccacgttgaactcggcgttttgcacagtgaagcgaaaaaaatggagcgggcaaaaatcattgccgcattcgaagacggagagtttcctcttttattggcgactgacattgccgcacgcggtttagacattgaaaacctgccatacgtgattcatgctgatattccagatgaagatggctatgtccacagatcaggacgaacaggccgggccggaaaagaaggcaacgtgctgagccttgtgacaaaattggaggaatctaagctgaaaaaaatggcgaagaagcttggtgttgagctgagtgaagctgtgtatgcaggcggaaaactgaagacgaaataaaaagaagggcgaaaagccctttttttgttgtaaaataatagaaaaagtttcgcgcagggggtgggaaggtggtttcaatagacaggtttcaagcagtgaaggagtcagagctgaaaattcttgaaagctggtttgagaatgaggataccagacggagaatggatgggatgctgccattagatgaatggtatgcacgagtaaataaagataaacacgatactgtcatcatggcgtatgatggacagctgccggcagggatggtcgttattgagttcggggagaagcggacatatattggattgatcgtcaatcctttgtaccggcttcaagggtacggaaaacggatattgcaaaagctgatgaccgaacctgattttactagcgtgcgggaatgggtggcatgcattgaagaagacaatcgaatcagtttagcttgctttcaagcagcaggattcactttggaagatacagaacctgatgaagatggttttcttacgctgattcttcgcagctgatctcatcgaaacacaaaaggagggcaaaaagccctcccgttttcatcttcattcagctcggatcactgaccttgatcagctgtttccctttattttctcccttaaataaaccgagaaacgcgtcaggaatgttttcgaagccttctgtgatggtttcctcgtaatggagtttaccagccttcagccattcggccagctgttttgctccctcagaaaaacgatcggagtagtcgcttacgataaagccttgcatcagcgacttcgttttaatgagttttgattggacacgagggcccatgtcatctgcttcgctttctgcgttataggaagaaatggcgccgcacaccggaatgcgggcaaattcattgagcagattcatcaccgcgtctgaaatcggtccgccgacattgtcaaaatacacatcgacaccgtctggacaagcgttttgaagcgctttttggatatcatccgctgttttgtaattgatggcttcgtcaaactgaagctcctgttttaaatagtcgattttttcatcagaacccgcgataccgacaactcgcgcgcctttgattttggcaatttgcccgactgttgaaccgacggctccggcagctccggagacaaccacggtttcgccttccttcgggcgtccgatgtccagcaatccgaagtatgctgttaagccggtcattcccaaaatgccgagataggccgaagcgggagcaaggcttgtatcaatttttcgcaaggcagactcgctcacagcggaaaattcctgccagctgagatttccgatgacgatatcgccttttttcagatgattcccgtctgacacaacttcagcgataaccccgccagaaagcgcttcatccaaggcgaacggctcaacatatgacttcgtatcctgcatacggccgcgcatataagggtcaaccgaaacataaagcgttttgacaagcacttccccttgcttgggttcaggaaccggaatggtttcaaagcgaaagtcttcatgaacaggaataccttgtggacgtcttgctaattgaatttgctgctgagatgctgtcattttcatcctcctatcacttggttgacaccactgtaacatggacaggagaggaaatacaaaaggtaagctggcatacaaaaaaggagagggggctcctctccttttcatttcgcccgtaatttcgggcacagtcccgtcggcaggcacattggcttctggtcgatcgggcttctcatgatgcagcattccaagccgaagacttcacggaaaaatggctgggtgaacacatcttccggtgttccggcgttgtatatttttccgtccagcacactgattagatagtcagcgtattgagcggcttggtttaaatcatggagcaccatgacaacggtgcggccatggtcgcggttcagctttttcagcagttcaagcacttcaatctgatgtgagatgtctaaatacgtggtcggctcatcaagcaaaagcaaatcagtgccttgcgcaagtgccatggaaatccaggctctttgtctttggccgcctgagagggcatcaagtgtccgatccttcagttcaatcatgcccgttgcttccagcgcccactctaccatgtcatgatcctcttgggtatgcttggataacagctttttgtgaggatgtctgccaaaatagcataactcctctaccgtcaatccttcaggggcctgaggagattgtggaagaatggccagtttttttgcgacttcttttgatggctggcggtggatgtcttttccttctagtagcactgtaccgcttttcggggccatcagcctggcgagcgatttgaggattgttgatttaccgcagccattagcgccgatgagcgcagtgatttttccttcttctatctttaagtcgactccgtcaataatcactgtactgtcatatgaaagagtgagctggtctgcagccagttttcccatggtatcctctccctactgtttcctcgcttcgaatttcaataaatataagaaataaggcgcgccgatcacggctgtcagtattccggcaggtatttcaaccggaggcatgatgccgcgccctaacgtatctgcaattaataatataatagcaccaatcaatgccgatgcaggcagtaaatatttagctttttctccggtaagccgtctggcgatatgcggagcaagcaagccgataaaaccgattgagccgacgacggctacacagcttcccgccagcgccaccgcggtgaaaatcaggatgaatctcagccggtttgcgttttctccgagaccctgtgcaagctcatccccgagtgacataagatccagcttcggtatgagtatgcagacgatcggaaaaagaatcaaaagccatggcgcaagcaggttgacttcttcccagtttcttccccagaggcttcctgtcagccaaatgagtgcagcattcacgtcgcctggaaacttgaccatcatatattgcattccggcgtggcagaccgcgcctaaagcaatgcctgataaagccagtgaagagggctgaatgctcttttttcgggctatcattaataatagtacagcaataatggcggctccggcaaatgcggagaacggaagcacgtataccggcgactcaggaaagatgagaatcacagccatcgccgcaagtccggagccttttgaaatgccgacaacgtccggggaagcgagtggatttcggatcacaccctgtaaaatcgctccggcagcggcaagcccagcaccggccaaaatcgctaatataatgcggggaaggcgatattgctggatgataaattcaaaggaatgatccagtcccagcagattcgtcactaccgcatcaggtgaaatgtataatgcaccgattccaatgctgatgacggacagaacgattaaaatcacggccaatatgagtatcgccagtaaggggcgtttttgttttctggttgttttcttcatttcagatgtcgccctttccttgccaaatataagaaaaacggcgttccgataatcgcggtgacaatgccgaccggtgattcataaggaaatgcaatccatctggccagtacatctgcgtacaccagcaaaatggcaccgaacagtgccgaaaacggaagcacgtattgataatgttctccgatcagcttgcggacaatatgcgggacgagcagcccgacaaagccaatcggcccggcgacggctacggaagcgccggaaaggattaaaataatcaaactgatcagaatccggatgccgttcatattttgtccaagcccttttgctgtttcgtctccgagaccgagaacagaaacagaaccggaaaatacgagggcaagcccgatgccaatgacagaaaacggagcgatggttatgacgtcctgccagttgctgccgtcgattgcgcctgtcatccagtacagaacatcctcacctgactcatttaaaataatgatggcctgtgtcatagaggagaggaacaaatgcacggccattcctgacagcgccagcttaacaggtgtcattccgccggatgaggcaatcatatacacaatcgcgccgcctgctgccgcacccgcaaaagcgaatataacagatgaatagggcgatgccggcagaatgacgagagaagcaacgacaaaaagcgatgcacccgcattcacaccgaaaatttggggtgaagccagagggtttctggtcatagcctgcattagcgcccctgctacagctaggctggcgccgacaaaaacgccgattaatgtgcggggaaggcgaagagtagagatgatgagctgttcctttgaaccgtcccatacaaaaagatatttcaatgaatctatgatgccgatgtctgaggctcctactgaaagattcagcccaagcccaaatataaaaataatcagtgcaatgatgaacatcatcagtcttgatgatgagcgccgtttggctgattgatacaacagtctcacttccttactgcgtctggttgcaaaaacgaagaagcaaggattcccctcgcttctcatttgtcctatttattatacacttttttaagcacatctttggcgcttgtttcactagacttgatgcctctgaatcttgtccaagtgtcacggtccgcatcatagacttgtccatttttcaccgctttgagatttttccagagcgggttcgttttccactcatctacaatggttttgccttcgttggctgagatgaacaaaatatcaggatcgattttgctcaattgctcaaggctgacctcttgataggcgttatctgacttcacagcgtgtgtaaagcctagcattttaaagatttctccgtcataggatgatgatgtatgaagctggaaggaatccgctcttgcaacgccgagaacgatgttgcggttttcatctttcggaagttcggcttttagatcgttgatgacttttttgtgctcggcaagcttttcttttccttcatcttctttatttaatgctttagcaatggtcgtaaagctgtcgatcgtttcgtcatatgtcgcttcacggctttttaattcaatcgtcggagcgatttgtttcagctgtttataaatgtttttatggcgctcagcgtcagcgatgattaaatcaggcttcaaggaactgatgacctcaagattgggttcgctgcgtgtgcctacagatgtgtaatcaatggagctgccgacaagctttttaatcatatcttttttgttgtcatctgcgatgcccaccggcgtaatgccgagattgtgaacggcatccaagaatgaaagctcaagcacaaccacccgcttaggtgtgccgcttactgtcgtttttccttcttcgtcatggatcactctggaatccttagacttgcttccgccgcttccgttgttattctggcttgatgaacagccggatacaatgaggcaggcgagcaataaaacacttatgatggcaatcaacttgttagaataggtgcgcatgtcattcttccttttttcagatttagtaatgagaatcattatcacatgtaacactataatagcatggcttatcatgtcaatatttttttagtaaagaaagctgcgttttttactgctttctcatgaaagcatcatcagacacaaataagtggtatgaagcgttaccgtgtctttgagacaaaaacgcatgggcgttggctttagaggtttcgaacatatcagcagtgacataaggaaggagagtgctgagataaccggacaatttcttttctatttcatctgttagtgcaaattcaatgtcgccgatattcatgataatcgagaaaacaaagtcgatatcgatatgaaaatgttcctcggcaaaaaccgcaagctcgtgaattcctggtgaacatccggcacgcttatggaaaatctgtttgactaaatcactcacaatccaagcattgtattgctgttctggtgaaaagtattgcattagacatacctcctgctcgtacggataaaggcagcgtttcatggtcgtgtgctccgtgcagcggcttctctttaattttgatttttctgaaaataggtcccgttcctatcactttaccatggacggaaaacaaatagctactaccattcctcctgtttttctctttaatgttctggaatctgtttcaggtacagacgatcgggtatgaaagaaatatagaaaacatgaaggaggaatatcgacatgaaaccagttgtaaaagagtatacaaatgacgaacagctcatgaaggatgtagaggaattgcagaaaatgggtgttgcgaaagaggatgtatacgtcttagctcacgacgatgacagaacggaacgcctggcagacaacacgaacgccaatacgatcggagccaaagaaacaggtttcaagcacgcggtgggaaatatcttcaataaaaaaggagatgagctccgcaataaaattcacgaaatcggttttcctgaagatgaagccgctcaatttgaaaaacgcttagatgaaggaaaagtgcttctctttgtgacagataacgaaaaagtgaaagcttgggcataaagcaaggaaaaaaccaaaaggctatgacggccttttggtttttttgcggtctttgcggtggtattttgcagaatgccgcaataggatagcggaacattttcggttctgcatgtccctcaatttgctattatatttttgtgataaattggaataaaatctcacaaaatagaaaatgggggtacatagtggatgaaaaaagtgatgttagctacggctctgtttttaggattgactccagctggcgcgaacgcagctgatttaggccaccagacgttgggatccaatgatggctggggcgcgtactcgaccggcacgacaggcggatcaaaagcatcctcctcaaatgtgtataccgtcagcaacagaaaccagcttgtctcggcattagggaaggaaacgaacacaacgccaaaaatcatttatatcaagggaacgattgacatgaacgtggatgacaatctgaagccgcttggcctaaatgactataaagatccggagtatgatttggacaaatatttgaaagcctatgatcctagcacatggggcaaaaaagagccgtcgggcacacaagaagaagcgagagcacgctcgcagaaaaaccaaaaagcacgggtcatggtcgatattcctgcaaacacgacgatcgtcggttcagggactaacgctaaagtcgtgggaggaaacttccaaatcaagagtgataacgtcattattcgcaacattgaattccaggatgcctatgactattttccgcaatgggatccgactgacggaagctcagggaactggaactcacaatacgacaacatcacgataaacggcggcacacacatctggattgatcactgtacatttaatgacggttcgcgtccggacagcacatcaccgaaatattatggaagaaaatatcagcaccatgacggccaaacggatgcttccaacggtgctaactatatcacgatgtcctataactattatcacgatcatgataaaagctccattttcggatcaagtgacagcaaaacctccgatgacggcaaattaaaaattacgctgcatcataaccgctatcaaaatattgtccagcgcgcgccgagagtccgcttcgggcaagtgcacgtatacaacaactattatgaaggaagcacaagctcttcaagttatccttttagctatgcatggggaatcggaaagtcatctaaaatctatgcccaaaacaatgtcattgacgtaccgggactgtcagctgctaaaacgatcagcgtattcagcgggggaacggctttatatgactccggcacgttgctgaacggcacacagatcaacgcatcggctgcaaacggactgagctcttctgtcggctggacgccgtctctgcatggatcgattgatgcttctgctaatgtgaaatcaaatgttataaatcaagcgggtgcgggtaaattaaattaagaaagtgaaaaacacaaagggtgctaacctttgtgttttttaattaattaaaatgtttattaacttagttaaggagtagaatggaaaaggggatcggaaaacaagtatataggaggagacctatttatggcttcagaaaaagacgcaggaaaacagtcagcagtaaagcttgttccattgcttattactgtcgctgtgggactaatcatctggtttattcccgctccgtccggacttgaacctaaagcttggcatttgtttgcgatttttgtcgcgacaattatcggctttatctccaagcccttgccaatgggtgcaattgcaatttttgcattggcggttactgcactaactggaacactatcaattgaggatacattaagcggatttgggaataagaccatttggcttatcgttatcgcattctttatttcccggggatttatcaaaaccgggctcggtgcgagaatttcgtatgtattcgttcagaaattcgggaaaaaaacccttggactttcttattcactgttattcagtgatttaatactttcacctgctattccaagtaatacggcgcgtgcaggaggcattatatttcctattatcagatcattatccgaaacattcggatcaagcccggcaaatggaacagagagaaaaatcggtgcattcttattaaaaaccggttttcaggggaatctgatcacatctgctatgttcctgacagcgatggcggcgaacccgctgattgccaagctggcccatgatgtcgcaggggtggacttaacatggacaagctgggcaattgccgcgattgtgccgggacttgtaagcttaatcatcacgccgcttgtgatttacaagctgtatccgccggaaatcaaagaaacaccggatgcggcgaaaatcgcaacagaaaaactgaaagaaatgggaccgttcaaaaaatcggagctttccatggttatcgtgtttcttttggtgcttgtgctgtggatttttggcggcagcttcaacatcgacgcaaccacaaccgcattgatcggtttggccgttctcttattatcacaagttctgacttgggatgatatcaagaaagaacagggcgcttgggatacgctcacttggtttgcggcgcttgtcatgctcgccaacttcttgaatgaattaggcatggtgtcttggttcagtaatgccatgaaatcatccgtatcagggttctcttggattgtggcattcatcattttaattgttgtgtattattactctcactatttctttgcaagtgcgacagcccacatcagtgcgatgtattcagcatttttggctgtcgtcgtggcagcgggcgcaccgccgcttttagcagcgctgagcctcgcgttcatcagtaacctgttcgggtcaacgactcactacggttctggagcggctccggtcttcttcggagcaggctacatcccgcaaggcaaatggtggtccatcggatttatcctgtcgattgttcatatcatcgtatggcttgtgatcggcggattatggtggaaagtactaggaatatggtagaaagaaaaaggcagacgcggtctgccttttttttattttcactccttcgcaagaaaacggattttgaaaaatgagaaaatttcctgtgaaaaatggtatgatctaggtagaaaggacggctggtgctgtggtgaaaaagcggttccatttttccctgcaaacaaaaataatggggctgattgcggctctgctggtctttgtcattggtgtgctgaccattacgttagccgttcagcatacacagggagaacggagacaggcagagcagctggcggttcaaacggcgagaaccatttcctatatgccgccggttaaagagctcattgagagaaaagacggacatgcggctcagacgcaagaggtcattgaacaaatgaaagaacagactggcgcgtttgccatttatgttttggacgaaaaaggagacattcgcagcgcctctggaaaaagcggattaaagaaactggagcgcagcagagaaattttgtttggcggttcgtatgtttctgaaacaaaagcggatggacgaagagtgatcagagggagcgcgccgattataaaagaacagaagggatacagccaagtgatcggcagcgtatctgttgattttctgcaaacggagacagagcaaagcatcaaaaagcatttgagaaatttgagtgtgattgctgtgcttgtactgctgctcggatttattggcgccgccgtgctggcgaaaagcatcagaaaggatacgcttgggcttgaaccgcatgagatcgcggctctatatcgtgagaggaacgcaatgcttttcgcgattcgagaagggattattgccaccaatcgtgaaggcgtcgtcaccatgatgaacgtatcggcggccgagatgctgaagctgcccgagcctgtgacccatcttcctatagatgacgtcatgccgggagcagggctgatgtctgtgcttgaaaaaggagaaatgctgccgaaccaggaagtaagcgtcaacgatcaagtgtttattatcaatacgaaagtgatgaatcaaggcgggcaggcatatgggattgtcgtcagcttcagggagaaaacagagctgaagaagctgatcgacacattgacagaggttcgcaaatattctgaggatctcagggcgcagactcatgaattttcaaataagctttatgcgattttagggctgcttgaacttggggagtatgatgaagccattgatctgataaaagaggaatatgcgatacaaaatgaacagcatgatcttttattccataacatccattcgcagcaggtgcaggccattttgttagggaaaataagcaaggcatcggaaaagaaggtcaagctggtgattgatgagaacagctcactcgcgcctcttcctgcgcatatcggcttgtcccatcttattacgattattggcaatttaattgataacgctttcgaagctgtagcggagcaaagcgtgaaggaagttttgttttttatcacggatatgggccatgacattgtcattgaagtatcagacacagggcccggtgtgccgccagagaaaatagaagctgtgtttgagagaggctattcttcaaaggggatgaggagaggctacggtctggccaatgtgaaagactcagtgcgtgaactgggcggctggatcgaactggcgaatcaaaaaactggcggggcggtattcactgtgtttataccgaaggagaaacaaagggggaatccatttgattcacatcgcgattgcggaggatgattttcgagttgcgcaaatccatgagagattgattaaacagcttgatggattcaagattatcggcaaggcggctaacgcaaaagagacattggcgcttttgaaggaacacaaggctgatttgcttctgctggatatttatatgccggacgagcttgggaccgcgttgattcctgatatacgaagccgatttcctgaagtggacattatgattatcacagcggcaacagaaacccgtcatttgcaggaagcgctaagggcgggaattgcccactatttgatcaaacccgtaacagctgacaagttcaggcaggtgctgcttcagtataaagaaaaaaggaagctgctcatgtctcagccggaggtcagccaatccatgatcgaccatatttttgggaacagtgtgaagacagctttgccggcagagaatttgccgactggcattaattcgattacactgcgaaaaattaaggaagcgcttcagactgcgtcagaaggattgacagcggaggaacttggggaaaaaatgggggcgtcacgaacaactgcccgccgttatgccgagtaccttgtgtcaaaggaagaagcaagagccgagcttgaatacgggattatcggcaggccggagagaaaatattatttggcggcggattagatatgaaaaaatctataatcctattgattattctattgatctttactcagggtgatatcaggcaggcggctgcgccgcgcctgccggacgggccgatagaaattgtcgtccctgccgaaccttctggcggctgggatgtcacagcgcaggcgatccaatcagttttgaggcagaagcagatcgtgaaggatgatgttcatatcgtctataaatccggcggcgggggagagaaaggctggaaatatgtcaacaaaagcagcaaacaaaccatcagcatgacgtccagcttaatattgagcaatgatcttctcgggcaaagcaaattaaaaatggccgattttacgccgctcgccattctctccaaggaatggcagacggttgcattgccaaaaggatcagcgttaacaaatggcaaggatgtgctgaatgagatcaacatgcatcccggcaaggtgagaatcggctttgccccggggtttggcaatgatgatcagctctcgttcgtcagagcggcagatatgtacggcattgacccgtttgacattcaattctcacagtatgacagcagcgaacagctcattcaggcgctgatcagacatgagatagaagcggcttccatgaccctttctgaagcgaaaccatatgaacgaaacggcgatatcacgttagccgctgtaacatctgataaaagacttcccggttttccaaatgtaccgacgtggaaggagcagggaatcccgtttgttttttctcattggagaggaattttgggtccgaaaaatatgtctgaggaagagatttcttactgggatcaagcgctaaagaaggtcacctcttcacctgaatggaggcggaaaataaacgaacaggactgggaaagcttttatttaaacagcagggaaacgaaacggtttttagaagagcaatctgctttttatcaaagcatcatgacaggaaattaagatcccggcatccccgggatttttttcatgccgaaaattgatcaaaaagaacaaaacggttttaaaaaattaaaaatacaaaaaaaacaaattatttacttgcggttggttttcccatacgatggcaaaaaggcaagacaaaaaggggagtaagggagaaaaaaatgtaagcggattcatttaagggggaatggatgtgttagcaatcttaggctttctcatgatgcttgtgtttatggcattgatcatgacaaaacggctttctgttttaacagcattagttttgacgccgattgtgtttgcgcttatcgccggatttggatttactgaagttggggacatgatgatttcggggattcagcaagtcgcgccgactgcggtcatgattatgtttgcgatcttatattttggaattatgattgatacaggcctgtttgatccaatggttggcaaaattttaagcatggtcaaaggagaccctttaaaaattgttgtcgggacagcggtccttacaatgctcgtcgccttggacggagatggctcgacaacgtacatgattacgacaagcgccatgcttccgctctatttgctgctaggcatccggccaattatcttggcaggaatcgcgggagtcggcatgggaatcatgaacacaattccatggggaggtgcgacgccgagggcggcgagtgcgctgggtgttgatccagctgagcttacagggccgatgattcctgtcattgcaagcgggatgctttgtatggtggcggttgcgtatgtgcttggaaaagcggaacgaaagcgccttggtgtgattgaactgaaacagccagccaatgccaatgaaccggcggctgcggttgaagatgagtggaagcggccgaagctttggtggttcaatttattgttaacgctttctttaataggatgtttagtatcgggtaaagtcagtttaaccgtactgtttgtcattgcgttttgtattgcgctgattgtgaattatcccaatctcgagcatcagagacagcgcatcgcggcgcattccagcaacgtgctggctatcggttcaatgatttttgccgcgggggtgttcacggggattttgacaggcacgaaaatggttgatgaaatggcgatctcgctcgtgtccatgataccggaacaaatgggcggattgatcccggcgattgttgccttaacaagcggcattttcacattcttgatgccgaatgacgcgtatttctacggggtgctgccgattttatcagaaacagctgtcgcatacggtgtggataaagtggaaattgccagagcctctattatcggccagccgattcatatgctgagtccgcttgtgccatccactcatttgcttgtcggactcgtcggagtttctattgatgaccatcaaaaattcgcattgaaatgggcggttctcgcagtgatcgtcatgacggctatcgctctattgatcggtgcgatctctatttccgtatgataattcaggcgtaatgacacacactaacggcatacaacattccggaggtgtcattatgagtgatccttatatgccgctgacttcagtcagaagcggaacggggttcgaagcggcaaaaggggtgcacggcctgactgtgcaaattgcgaatgtctattttattcagctgccttctgaacctcactcatttgttttaattgatgccggcatgcctcaatcagccggcatgattgtcaatgaagccaaacaaagattcggtgaagggtttcagctgaaggcgattatcctcacacacgggcactttgaccatattggggcaatcgaagagatccttgagcattgggatgtgcctgtttatgtccattctcgggaaatgccttatgtaacaggtaaaaaggattatcctccggctcgtcctgacagcaagagcgggctggtcgctaagctgtcgccgctgtttccgcggcactccatcgatatttcctcacatgtccaggcactgccggaagacggttcagtcccttttcttgacgagtggatgtggatcgcgacaccaggacacacgccgggccatatttcgttattccgcgatgacggccgcgtgcttgtagcaggtgatgctgttattacagtggaacaggagaaaatggctgacgtcttgatacaaaaacaggagcttcacgggccgccggcttatttcacgcctgacacagagacggccgcggagtccattctaaagctggccggtcttgaaccggaagcgttattgacagggcacggcataccgatgaccggcaaaaactttcgaagtgacttaactgaattggcaaatcggttatcgtctatttgacacccgcaccacgcgggtgttttttattgttttccaggaagttgcagaaaaatcatttgtcttgccgcttaaaaacgatacaatgaaaagcatgaagtgatgtgaaggggagagtttgttggaagaaaaagaaatactctggaacgaagcgaaagcgtttattgccgcatgctatcaggaattgggaaaggaggaggaagtgaaagaccgtctcgaggacattaaaagtgaaattgacctgaccggaagctatgtacatacgaaggaagagctggagcacggagcgaaaatggcttggagaaacagcaaccgctgcatcggcagattgttctggaattcgctgaatgttattgacagacgagacgtccggacgaaggaggaagtgcgtgacgccctcttttaccatattgaaaccgccaccaataacgggaaaatcagaccgaccattacgattttccctccggaagagaagggtgaaaagcaagtcgagatctggaatcatcagctgatccggtacgctggatatgagtcagacggagaaagaatcggcgacccggcttcctgttccctgacagcagcctgcgaagagctcggctggcgcggagaacgaacggattttgacctgctgccgctcatttttcgcatgaaaggcgacgaacagcctgtctggtatgagctgccgcgttcacttgtgatcgaggttccaatcacacatccggacatcgagacgttttctgatttggagctgaagtggtacggcgtgcctatcatctctgatatgaagcttgaggtcgggggcattcattataatgccgcgccatttaacggctggtatatgggcacggagatcggagcgagaaacctcgcagatgaaaagcggtacgacaagctgaaaaaagtagcgtccgtgatcggcatcgccgctgattacaatacggatttatggaaggatcaagcgctagttgaattgaataaagctgtgctgcactcgtataaaaagcagggtgtcagcatcgttgaccatcatacagcggcaagccagtttaaacggtttgaagaacaggaggaagaagcgggcagaaagctgacgggggactggacgtggctgattccgccaatttcacccgctgccactcatatcttccaccgatcctatgataactcaatcgttaagccgaactatttttatcaagataagccttatgagtaaacaatagaaaatcgatgatggccttcaaggctgcgggattcagtcacagagatgtcggtaacctttgagaaagggcttccgttctttacagcctcaacaaacgattgcagggcgttttccggaccctctgccaaaatctcgacacgcccgtcatcacggtttttgacccagccggccagttttcgcttatcagcttccatttgaacaaaatagcgaaagcccacaccttgaacccggccgtctacaatgattcggtattgaagcatgtaaaaaccaccttttctttttatgataatcaatcattttacaacctgtaaaggggatgtgtttgtatgaaaccagagcgctattcagttctttctcttaatctgggaaaaccgcagacgcttgaatatgacggaaagaaaatcgataccggcatcatgaagcgtccggctgaatcagccgtcatgctgtatcgggagaattttgaaggagacggacaggcggacctcgtcaaccacggcggacctgataaggctgtctgtgtctacccggcggagcattatccgttttgggaagagttcctctcaagaccgctgtcaaatgccgcatttggagaaaatctgacggtcgcgggcctgactgaggagaatgtttgcatcggggatgtgttcaggcttgatgaagctgttgttcaggtcagccagccgcgccagccgtgtgtaaagctggcgaaaaagtttggtgtaaaagaaatggtgctgaaggtccagcaaaccggctatacagggttttattttcgcgtgctggaggagggcagggtgtctcccggcgcgaaccttgaattgctgtccagaggagagaagggcatatccgtccagttcgccaaccgcatcaactaccatgatgcaaaaaatctcaccgccattgaacggattttaagtgaggctgcactatcggaaagctggagagcgtcctttatgaaaaaaaaggacaggctgctgccggttgaatagaaaaaagccgcgcatatcaacgtgcgcggctttgccatatttaagattgttttttctttgtttcaagcaggttggcaagaaaataggttttatagctttgaagctttcttccctcatggtgcgtgatcccctgcttttttagttctgccacataccagcctttactgccgtaatgcatgtcagaaaactcctttccctatctgatttcgaaacgattggcattgtaacatctataaaaagatgctgaaaagagatgcggggaaaactgagcctttcgaactagatgtgcgaatgttcttctgtatgtatatgcggagcaaaagccgaatatgatttaatggccggttagtttgatcatgacaacgccaaatgtcataatggcgaaaacaatgccgatatatgtgagcatcccgttttttttcttaacgccgtaaacggttataatgatgccttcaatgaaaaaaatgatgccgaaaataataaaccacatgcagataaaggctcctttcacagacataatagtagtgtagcatatctgaaagagccgggctgtgataatatcaagaaagccgggcgcatatcgcccggctcatgttttattgtttatcaaccaatttgaccagaagctgtgccaaatgttctttctcatcttcgtccgcaacgctccaaagctcttgcagcagcatttcttcaccgttttgcggctcttcatgctttgcgaggtagtctcccaggatcgcagcgctttttacaagcttgccgtcatccaatcccagctttttgcctcggttgacttgttttttcaggtagcctttaaattcatcaaagtcttttaaaatgtcttcttttattgtgccatgcatcgcgttcatttcgttttcaatttggattttttcttgatctctgttcattgcaagacctcctcgtgcagaataatgatgttttacctgctattggaggaggttaaacctgccggaagcccggaatgtgttttacagtttcgtcaggataatcggttcatcttttgtgatgacgatcgtgtgttcaacttgggcaaccatgcttttatccggcgtcttgaacgtccagccgtctccagcttcaacaatcgtttctgctttcgttgaaataaacggttcaagcgcgatgactgtgccatttttgaacagtgcgttatcaaacggatcataatagttcatgatgtggttcggcgcttcatgcaggcttcggccgattccgtggccggtcagggttttgatgacggtaaagccttgagagcgtgcttcatgataaacggctcttccgatctggttttggcgcttgcccgcttttgcctgctgaagccccttttgaaaagcgttttccgcgcattggcaaagcttatgaaggcgttcttctccttcaccgagcacaaatgagatgcctgtgtcggaatagaagccgccaaattcagcggagatgtcgatgttgacaaggtcccctgcttttaaaattttggatgtgcttggtatgccgtgagccacttcatcatttacgctgatacatgtcacacctggaaaatcgtattccttctcaggagctgaaacggcgccgtgctcatcaagcacagcttttccgataaggtcaaggtcttttgtgctcatgccgggctctgccttccgcttcatttcttcacgcgcaagcgcgacgattcttccgatttttttcaggccttctaattcttgatcgtttgttacaatcatctgtcattcccgctttctttttaaataatctagattaagcttaccacaactgtcttaaaaataggaaacacacggacctgggaaaaaagaaatacccccgggaaaattggtatagatcactagatatcttatatggtatatttgaaaaaaaagggtatgaggggatgggtatgctttcatttttacaaaaactcgggaagtcatttatgctcccgattgcggttctgcctgcggttggaattatccttgcgcttggcagagaggatgtatttaatatcccgtttgtctatcaggcggggacggcggtttttgatcatctgccgcttatttttgcgatcggtattgccatcggcatttcaaaagacagcaatggggccgcgggtttatcaggggcgatatcgtatctgatgcttgacgcggcaacaaagacaattgataaaacaaataacatggcggtgtttgggggaattattgccggtttaattgccggttacacctataaccgcttcaaggataccaagctgcctgaatatctcgggttcttcagcggcagacggcttgtgccgattttaacagccattattacgatcattttagcgggcatattcggagtcgtctggccgccgattcaatcgtgtatcaactcgtttggagagtggatgctcgggctcggcggcatcggggcaggcatattcggccttttcaacaggctgttaattccgcttggccttcaccatgtgctgaacaatattttctggttccaattcggagaatataacggagtgacaggggatctggcgcgctttttcgcgaaagatccgacagcgggcacatatatgaccggattcttcccaatcatgatgttcggtcttccggcggcgtgtctggctatgattgtgactgcgaagccgtctaaacggaaagcgacggctggaatgatgattggatttgctttaacagcgtttatcacagggattacggagccgattgagtttgcatttatgtttttatctccgcttttatacgctgttcacgcggtcttaaccgggttatctttatttatcgtcaactggctcggcatccgttcaggcttctctttttcagccggagctatcgattatgtgctcagctatggaatcgcagaaaaaccgctgcttctgcttttggtaggtatatgctatgcggcagtatactttatcgtgttttatgtactgattaaggctttgaatttaaaaacgcctggacgggaagacgatgatgtggatgaagtgctggatgaaaatactgttcaggatgtaaatgaaaacatcatgctgaaagggctcggcggaaaagaaaaccttcaaaccattgatcattgcgccacaaggctgcgactgactgtgaaggataccgctttggtggatgaagcgctgctaaagaaagcaggcgcaaaaggggttgtcaaatcaggggggcaatcggttcaagtcattattggcccgaatgtggaatttgcggcggaagaattgagggctgctgtcaaataaaaaaagcggagagggcaacctctccgctttttcttatttatcttcgttatcctttgacgtttcggaagaatcttcgtcatgttttgtgtaatcataatcagaaggattcaccttcttaaaacctttcggctcgtagaaccgcagcaggtctccgtttatgattttatcggacatttcaagttccttcttgacgagcgagtcttctgacttgtcgacttcggattcatcgagttcttttccggttttcgtgtcgtaatacttaccggatattttcgtgtacttcggtgaaataaagtctccgtttcggaacggaatcacttcacggtgttctttcgataaaatatcagaaccggacatcagatagtccttcgtatccactccgagcagatgcagaatggtaggagccacatcaacgtctccggcatatttatgaactttctcgcccttcacgccggcagcgtggataaagagcggcacccgttgaagctgggcgttgtcgtaatcagtgatttcatccttgccaagcactttcgccatcgctttattgtggttttcagagatgccgtagtggtctccgtacatcacaataatcgatttatcatataacccgtcttttttcagatcattgaagaattgttcaatggactgatcaaggtaatgggctgactggaagtagttatcgacgacagagtcaccaaagtctccagccgggaagtctgtatccccctcatccattccgaatgggaagtggttagacagggtaatgaacttcgtatagaacggctgcggcaggctttccagcagcggcattgattctttgaagaacggtttgtctttcatgccgtagtttttcgtgttttcttcgttcatgtcatagtaagcagaatcaaagaatttatcaatgccttccgccttgtacatttcgttacggttccagaacgtctgcgtgttcccgtggaaagtagcagatgtgtaattcttagacttcagaatcgccggaacggattgcagcgtgttttgcgctttgtttacgaaaactgaaccttgagccagcgggtacagagagttttccatcataaattcagcatcagatgttttaccttgtcccgtttggtggaaaaagttatcaaagtagaacgtttcgttatcatgtgccagtttatttaagaacggtgtcacttctttgccgtcaattttatagtcgatgataaatgactgcaaagattcaagtgaaacgtaaatgacgttttttccttccgctttgccgaaatacacgttattcggcacatcgtaattggctttcatgtagttttccacttccgtcacgtcgctggaatcggcaagcgcgcgctggctgttggacttgatattctgtacagcgtcataaatcgtgaaattgtatgttcccaagtatttcacaagatagttccggtcgaatgatcttgtcagcaattcaggacggtctgattccgcaactgccagattgatcaagaacacaagaattgaagacgcaaaaataattcggaacgattttttgcttgacgtttcggcaggcttgtttactttgatcgccaagatgatcaggatgatcgtatcgataaagtaaaaggcgtcagtcggtctcatcagcgaaaatgcgctgtcaccgagttggccgccgtttgttttagcctgcataatgaccggaattgtaataaaatcattgaaaaatctgtagtacacaatgttggcgtacagtaaaaaagacattaaaaaatgaatcactataatggctgtctgctgtaattttttcttgaacaagagtccaaagccaagaaagaacaagcttgagctaagaggattcacaaaaagcaatattttttgtatcgtgttgtctattcctaagttgaagttcaggacataaccgacatacgttttgatccataacaggacgaccgcgattaagaagaaggccagtcctctttcttttataaatgttttcattgttacactccttttttccgatccagttcgagcgaaacgatagaaaaaacgaacgtatccaatataacacgaatcagcagattagaaaagtgaaaatcgtatgatggagaaagtggcgaaaaacgccgtcgaatcaacgtttcgctttgatattaccaaatgtaaaacaaggtatctttctagaaatagaggaataaaatggtacattgggaattgtatgataaaatataaggtatagataaaaagaggtgaaatgatggatttttcccatattgtgtctgaagataaaattaagcgcgccatcaaagacggggactttcaaaacctcccgggaatggggaagccgctgccgaaggatgacgcggcacacttgccggaatcgctgcgcatgggctatcgtattttgaaaaacgcgggaatggcagaggacgagggcgcgctcaaaaaagagcttatgaccatcgaccatttaatcgaaaagtgctatgacgaaaaagaacgcgagcaattaatcagaaaaaaatctgaaaagcaattgctgcttgataagcttgtcgacaaaaaaggcatgttttcaaagccagcatccgctttttataagaataaagtatatgatcggcttggacgaaacagaccttcttccagctgatttgtcttgtctgcaggatggcgattgataatagccatcctttttatgttccaagttctatgtcaaaaggtttatgtttttccatctatgggaaatgattcataaacgaaaaaagggtgatgggatggaacgactattagtatggatagagcatatatctgattggctgtggggtccgccgctaatcatcctgctgacggggacgggcttgtatttcactattttgctgaaaggttttcaatttcgctatcctttatacattttcaaacagacaatcggcagcgtaggaaaaaagccgaagggagagggcacagtcacaccgcttcaggcattgacctcagccctcagttcaacgatcggtgcagcgaacattgtcggtgtgcccgccgctattatgtttggaggaccaggagcggttttttggatgtggcttattgccttatttgccatggcgattaagttttctgaaagtgttcttgctgttcattacagagaaaaaaatgagcagggtgaatacgtcgggggaccgatgtattacataacaaaagggctgcgcatgaaatggctcggcgtattcttctctgttgcgctgattgtggagctgatcccaagcattatggttcagggaaattcggtttcagtctcgcttgccgagacgttttctttcaataaaatatacgcaggaatcggaattgcatttttgattgggttagtggtgataggaggggtaaagcggatcggaaaagtaacagagtttgtcgtgcctcttatggcaggggcatacgcaggtgccggtctcctgattgttctcatgaatctatcatcagtgccggcgtttttctctctcatcttttcaaatgcgtttacctcttcttcagcagttggagggttcgcaggtgctgcgttggcggaaaccgttcgctggggatttgcccgcgggctgtattctaatgaagccgggatgggaacagccccgattgcacatgcggcagcaatgactgatcatcctgtgcggcaagggttttggtctgtgatcggcattgtcattgacaccttgatcatctgcacgaccaccgcttttgtcgttcttgcatctggtgtctggacagggaagaacgcctcaattgacccggcagcactgacgacggctgcatttcagcattatttcggttctggcggagggtacttcgtttcggtttccctagtcttctttgtcgtatcaaccattatggttgtcattttttacggcgtaaagcaagctgaatttctgttcgggcggctggcaggacacgtgattaaattcgtttatttagcggctattatcattggtgccgcaggcggagcaaaagccatttggggctttttggacttagcattggcttttattctcgttccaaatgtgattgcgctgttgttattgagcagaaaggtaaaagcgctgtacaccgaattctttacatctgaacagtactacctgaaagatataagaaaaacaaaacagaatcctgtttatcaaacaaaagaaactaaaaattcctagtgctttgctttggcgctgaacaacgctttgctttttatgatcaaataaatgagtaaaggcagcaaaagagaaatcactacattaatgattggtttgattctgttaaagtcgattagctgatttgtatttaaaaagaaccaaaagccgcatacgactgagaacatgccggttggtgtatacatggctttcgggtcgatttttgagtgtaaaaacgaaaggccgtataccacgatatatagggaacctgctatcttcaccataatgactggaatccaaaaagccgcgatgatcaggtctgagcgatccagaaaatccgtaatgcggatctgcctgatgaccatataagcaggatcaaagaaagtagatgtcaggttgggaccaaagacagaaattgaagaaaataacatcacggccagcaataaagcgcccagcagtatcgcgaaaatggtgtattttagcgggacgctccggtttgagaagagaagcggaaggataatcaattcccccattgtcccaaacgcgtaatagcctgattgaaggtatgggattagaccttcaaaaacaggtgtcaagttttgaagctcaatttgtgtggccagcgtaaatggaaggcacaagaccaggatgccgaatggaaataggaatatctgcgccattctggtcaatgtttcttttccctctctggcaatacagatcgccacaaagataataacaccgccaagaacagccattggtgttcttgggagaaataaaatgttaatcaaattgatgaaaaaacgtatatcatgagcattgattaacaggaaatacaaagaaaacagtaaaatgataatccggcctgcgattggtgaggaatcgctcagcagctcatagatatttttatcctgatgctttttcatcagcctatgcatgagccagagtgccggaatcacgaggacaacgccgaggatgtagctgtgccaggcattttgtttagctgattcgatcatgagaatcggagcatgctttaatccgactgctaacgtatacagagctccgaaaaataatccttggtatgcagaggtcttgtccataaagcacatcctttctgtcatgttcaaaacggaatatatttaaacaggtgccccagccgcggaagcaggggattcactctcatataaatccatagaaaagcacttcctgcaatcagcaggctgaaggcccattttgttagattgttagcggaacgaaaattcttccattcatatgcgtatatggcaatgcacacaatcaatgtctgtacgatatagctgatcatgctgacgcacctccattaatggctgatcgttttgtataggacaccgccctgctcaatcgtcacaattgggacgacgtgaacctccatatccttatatacctcttcccattcctttttcagcagattcttcgtggttgccgtgcttctgatggtcctgtcttgaaagccggccgggtccgcctttagcttttgcaaacgatgaacggtgctgatcacgtccttctttatggttctgtttagtgctttttgaatgatgtaatactggtcattttctctcgtctcataggttgattggttttccataataattcctttggctctgatctcgattgtcattgacagctttccgtttttttcagcggcatgaaaggatacattggacttttgaagctgaatggatgcttgtcccatttgattcggcaggtctactatgaattctggctggcgggcttgattcagcaacatcagggctgctgtcatgtgtacatctttgaaaatatccatcaatctgtcctttttaaagatcgcaagcccgtcaattttcaaattagatttgcctttccctccaggttttgttttagatgcagagatgaccggtgcatacggatcactgcctatttctactagatcagacatgaatctgcttaagaaaacgggccggctcgttgcgataatggccagctcccgaatcatttccgccggaaactgttcaagctgaacatcggtgtttaaaatgtcccgcgcttctccccggctgactaaaatgagcgccgttaatctgttctgcggatttcgcgttaaaatatcaaagactggggcaacgccgtctctcgccatatcctctccaataatgactgtacgtctgtgggacgtattgattgtccgtgacaaggaggtttgcagcttgttgttcgcttctctgatcgtagtgccggaagctgaatcaacataccatgtttttgaaccggcagttccgccgccgccccctgtttgtccgcctaattgaccgaccaagggaatctgcatggccactcgatactgatcttttttcttatcaatggctgagctgacaacaaatgcaatgtcattgatttctgtccggtcccagcaccccgttagaaggatacaaatgagaagcggcaaaacacacttatatattgttttcttcatcttttgggtcctctcttttcgctcccttctgtccgttgccgcgcgaatacgtgcccggccttctggtcatcgtccaccaaggcgccctgacaaaaatatcttttacttcatctcgtttaaacggagaaatcccggataaataaggaataccgaaagattgcagcttgcataaatggagcactaagataatcgtgccaagcataatgccgaaaatcccgaaaatactcgccaaaaacataagcgggaaacgaagcatcctgatggagatagctaagttaaaccgcggaattgtaaatgacgcgatccctgttaacgatacgatgatcaccatgggggcagacacaattcccgcttcaacagcggctgtcccaatgactagggccccgagaatactgacggtctggccgatggttttcggcaggcgcactcccgcctcacggagagcctcaaaagaaatttccataatcaatgcttctatgatggcggggaaaggaatcggttcacgagcggaggccacactgaacattaagtttgtcggcattaagtcctgatggtatgtaataacggcaacataaatagccggcaaatataaagcaacgaataaaaacatatagcgaagccagcggattaagttagacatcaaataacgctcatagtaatcttcactggcctgcataagctgccaaaacgtaatcgggcctgttaagacaaagggcgtattatctgtgaaaatggcaaatcggccttcgagaagctgggcggcgacagtgtccggcctttctgtgtattgcagctgggggaatggcgagtacgtgtcgtcttcgataaactcttcaatatatccgctttctaagacagcatcaatctttatctttttgattcttttttttactttgtcaatgacctttggatcggcaagcccgtcaatataggccaagacaacatcggttttggttttcgtgccgattttaaacgagatcattttaagctgaaacgttttgacgcgaaagcgcacaagagcggtattgaccctgaggctttcagtgaagccctctcttgaccctctgatggtcgattctgttatcggctcttcaatgcttcttctttgtccgccttttatatttaagatcaggccttttgagtgcccgtcggcaaataaaaccgcgttcccctcaatgatagatgcagccactttactcatactcgtttctgttgcaacacttgaaattgatagagtattttgcagcgcctcttcatgttcatctatttgatccgtcaaatgcgttaagaaagggcggagggcgtgatcctgaatatgttcagattttacaattccttcgatataaacaataaatccgcacagcccgtttccaaagtcaaattgtctaaatacgatgtctgagcagccttctgttaataaggtcagattatcgaggttttccttcaaattgggagagatcggtctgtcctgattgtcttcaagctctttgatgagctgaagcgctttgtcgcgtttattcatagaggctcaccctgctttttaatgtcatattcaataagtgcttgtgacttttagggtaaccttgtctgtttcatatattccagactaggatgaaagcgctataaaaaagtgttgactacctgtatatacaggaatacaatatgattataagttgtatatacaagttataaaaacggatacggaggggttggcatgggggaactgaacaaatcggcacgtcagattgtcgaagcagtcggcggtgctgaaaatattgcagcggcaactcattgtgttacacgtttgcgttttgctttaatagatgaaagcaaggttgaccaagagatgcttgatcaaattgatgcggtaaagggatcattctcgacaaacggacagtttcaggtcgtaatcggccagggaactgtcaataaagtatatgctgaactggttaaggaaacggggattggcgagtcaacaaaggatgaagtgaagaaggcctcagaaaaaaatatgaatcctttgcagcgtgctgtgaaaacgcttgcagacatttttattccaatattgcctgcgattgtcacggcgggtcttttaatggggatcaataacattttaacggcggaaggcattttcttcagcacaaaatcgattgtgcaggtttatccgcagtgggcggatcttgctaatatgattaacctgattgcaggcacggcctttacgtttttgcctgcgttaatcggatggtctgcagtcaagcggttcggcggcaatccgcttctcggcattgtgctcggggttatgctcgtgcatcctgatttgctgaatgcgtggggatatggcgcggcagaacaaagcggagagatcccggtatggaatctattcggcctagaggtgcagaaagtcggctatcagggccaggtgctcccaattttgcttgcttcttatatgctggcgaagattgaggtatttttaacaaaacgcacacctgagggcatacagctgctcgttgtcgcaccaattacgcttctcttaacgggatttgcctcttttatcattatcggcccgattacatttgcgatcggtaatgtactgacttcagggcttatctcggtgtttggttcttttgccgcactgggcggtctgttatatggcggtttctactcagcactcgtgattaccggtatgcatcacacgtttcttgcagtcgacctgcagctcatcggttcaaagctcggcggcacctttttatggccgatgctggcgctttctaatatcgcacaaggttcggcggctctggccatgatgtttatcgtgaaggatgagaaacaaaaaggcctctccctcacatcagggatttctgcttatcttggcattacagagcctgccatctttggggtgaatctgcgatacagattcccgtttatcattgcaatggtcagctctggcctggccggaatgtatatttcttctcaaggtgtgctggcaagctccgttggtgtcggcggcgtgccggggattttctcaatcatgagccagtactggggcgcgtttgcaatcgggatggctattgtattgatcgtgccgtttgccggaacatacgcgtatgcgagattcaaacataaataacaaatggggagcgggacgtgttgaacgttcccttttcccattttcaatttaaatatggtggtggagacagatgaaaacagaacaaacgccatggtggaaaaaagctgtggtttatcaaatttatccgaaaagctttaacgatacgacgggaaacggtgtcggcgatttgaacggcattattgaaaagctggattacttaaaaacacttcaggtggatgtgctttggctgacgccgatttatgattctcctcagcatgataatgggtacgatattcgtgattattactcgatttatcctgaatatggtacgatggaggattttgagcggctagtgtccgaagcacataaaagagacttgaaagtcgtcatggatcttgttgtcaatcatacgtcaacagagcacaaatggtttcgcgaggcgatctcttccatagacagcccgtatcgtgatttttatatatggaaagacccgcaggaaaacggttctcttccgacaaactgggaatcgaaattcggcggctcggcatgggagcttgacgaagcatcgggccaatactatttgcatctgtttgatgtgacgcaggctgatttgaattgggaaaatgaagaggtcagaaagcatgtctatgacatgatgcatttttggtttgaaaagggaatagacggctttaggcttgatgtcatcaacctgatttctaaagatcagcgctttccgaatgcggaggaaggcgacggccgctctttttacactgacgggccgcgggtgcacgaatttctgcatgaaatgaacgaaaaggtgttttcacattatgacagcatgacggtcggtgagatgtcttcaacaaccgtagaccactgcatccggtatacgaatcctgacaataaagaacttgatatgacattcagcttccatcatctcaaggttgactatcctaacggcgaaaaatgggccttggcgccgtttgattttttgaagctgaaggagatcctatctgactggcaaacggggatgcacgcaggaggaggatggaacgctctgttctggtgcaatcatgatcagccgcgcgttgtatcaagatatggagacgatggcgcatatagggtgaaatcggcgaaaatgcttgctacggccattcatatgatgcagggcacgccttatatttatcagggcgaggagctggggatgacgaatccgaagttcactgacataagctcctatcgggatgtcgaatcgctgaacatgtataacgcctttaaggaaaaaggaatggctgatcaagatattacagccattttacaggcgaaatcccgtgacaattccagaacccccgttcagtgggatgctacggaaaatggtggttttacaacgggcacaccatggataccggttgcaggaaattaccgggaaatcaatgctgaagcggcgctgagggatcagaattcggtgttttaccattatcaaaaattgattcagattcgcaaaatgtatgacattgtgacagagggtacgtatgagataattgcaaaggatgacccgaacatttttgcgtatctcagacacggcagcaatgaaaagctgctcgtgatcaataatttttacgggacagaggcggcctttacactgccggactctttagcgcctgacgaatggaaggcagaggtgctgttgacgaacgatgaagcaagggaagggcttcagaacatgacgcttcgcccgtatgagtccattgtttatcgtttaacgaaaccgtgttaaactaagctgggtggtccataatgaaggtgaataaattcatcacaatttataaagacatcgcacagcaaattgaaggcggccgatggaaagcggaggagattcttccgtctgaacatgagttgaccgcacagtacggtacatcaagagaaacggtccgaaaggcgcttcatatgctcgcgcaaaacggttatatccagaaaatcaggggaaaaggctccgtcgtgctcaatcgtgaaaaaatgcagtttcccgtttcgggccttgtcagcttcaaggagctcgcgcaaacgcttggcaaagaaacgaaaacaactgtacacaaattcgggctggagcctccgtcagagctgatccaaaaacagctccgggccaatctagatgacgacatgtgggaagtcatcaggtctagaaagattgacggggaacatgtgattttggacagggattattttttcagaaagcatgtccctcacctgacgaaagaaatttgtgaaaactccatatatgaatatatagaaggagagctcggtctttcgatcagttacgcccaaaaagaaattgtcgccgagccgtgtacggacgaggacagagagctgctcgatttacgcggctatgaccatatggtcgtggtgagaaactacgtctttttggaggataccagtttgtttcaatatacggaaagcagacaccgtctcgacaaattccgatttgttgattttgcgcggcgggggaaatgagagaggcgcctgcctgcggcagcgcgcttttttgtttggtatcaaaattgatactatccaacaaaaatgtgcgtacttttactttttatcataatggctacaatagagatgtgagtaatctaaaggagaggtgttttacatggcagatctaaagacacaaattctggatgcatacaatttcaggcatgcgactaaggaatttgacccgaataaaaaagtgtcagacagcgattttgaatttattttagaaacaggaagactgtctccgagctcactcggccttgagccttggaaatttgtcgtcgtccaaaatccggagttccgcgagaagcttcgtgaatacacatggggcgcgcaaaagcagctgccgaccgcaagccatttcgtcctgattcttgcgcgtacagcgaaggatatcaaatataatgcggactacatcaaacgtcatttaaaagaagtaaaacaaatgccgcaagacgtgtacgaaggctatttaagcaaaacagaagaattccagaaaaacgatttgcatttgcttgaaagtgacagaacattgtttgactgggcatcaaaacaaacctatatcgcgcttggcaacatgatgactgccgctgcgcaaatcggtgttgattcctgcccgatagaaggcttccagtacgatcacattcaccgtattcttgaagaagaaggccttctggaaaacggaagcttcgatatttctgtgatggtggcatttggctacagagtgagagaccctcgtccgaaaacaagatctgctgttgaagatgttgtgaagtgggtttaaataaagaaagctgctcgctaagcgagcagctctttttttatgcctgattcgctctattctgttttctcctctgatgtaagtacattgccgttccgagtgcgctgataagaaatccggccaataggatcgagtacatggatgtggctgtgtccggaagcaggccgccagccggaccgtctgttcctgatccgcccgaaccgtttcctccagagccgttagtcggttgagtgccaggaggcgtatcatttcctccgtttccgtcagttggctgttttccgcctggtttgtcggagccgccgccatgattgccgtcatcaccgcctgtcggttggtcggacgggaatgccggcggtttgttgttcgaaccggaatttaagatcgtgtattcgctgaagtggtttgtatatcctgtcaccatatcatcgtcaactgatccgttatctgtctttgtgaaagctttctttttcctgtcgacatgataaatggcagggttatgggcttcttcaatatcaaacatgcgaagcgaaagctgaacgggctccttgaatgattttatttcttttcctttttgctttactgtaaagtcatatacatctgccaatgacacattcaattctcccgtcgacttgattccgattgcagtgtctgcagttttaaggttcgccattggcatcttcatgctgtaccagtagttgaacaccgtcaatgaaggatctgactctctttctttcaaaagtttgacctgatctttttttactttgagattgataggcttctcttgagatccttcatgtgttccataatagacaaatggcgtgttggcatttttagcgtaaatcgcaaatttgtcttcatcaagtgtccagctgccgtcctcctgctttgtcggcaggaatacttctttgatccgtccttcaactttaggagagaccttgtttcctagttttttcagctgttcggtgaaaatctcataatcaacgtagccaaggtcttcaccatgggaggcttctgtaaagacagaatatccgtctcctccggcaccaacaaaattatttgttgccacgcggtaggtatcatccgtatttatagcaactttgtctccgttaggcgattcaattttcacttctaacacacggtgtccaggtttgttgtttaatgtaaaggtatattcgattccggccacctgagggaaagcgccgccgccattttccacattgcttaggccttgttcaagggcttctttaatttgttttccggttaaatcggccacgtaaagcgtattgccgaacggcatcacgttgagcacctcgccgagtgtgatatcacctttgtcaatgcctgctctgatgccgccgccatttgttatcgctattctggcgccggctgcttctttcgcttttgccagcataccgtccgcgatgaagtttccgagattcgtttctttcgtgcgcacatgctcacgctggccgtcaagcgccacatccgtgtagccgactttttcattttttacgtcctctaattcatttttgaactgatcgagctcttgttttgcttctgggttttcttctgtatgttcatcaattggcagcacgctcagatttgatttatctgtttgcacaacgcctttttcatcaaacgcgacatcaacgcgccccaagaattggccgtattcttttgcctgtgccacgatcgtcggttcttcgttgtttacgacctccattttgtcaacgagggtgtgagtgtgtccgccgatgatcaagtcaatgccttttacttttttggctagctcaagatcacggttatgaccgatatgggttaaagcaataattttatttacctgttcttcttcctgaatcgctttgacggtgttttgggctgtttcaaaggcatcattgaatacgatgcttttgcccgggcttgatgtggtggctgtatcttctgttgtcaggccgaatacggcgactttctccccgtcaacgtctaacagaatgtaaggatggatgccggcctccttcttttcacctgccgtaaaggtttgcggctttttgacaaatgatttcagcttggactcatttgtcacatctacgtttgcactgacaatcggaaattccggcgcttcaaagtgatagcggttcgccggatcaacggttgcgctgtttccgcttagaaaatcagaaagcactgtcgggcctttgtcaaattcatggtttccgaaggtcatggcgtcatagcccatcatgttcatcattttcagatcggccaaaccgttccatttagtaaaatacagatcgccggaaaacacatctcccgcatcaaggagaatattgtgatttgtttcgctgcgtacttcgttgattttcgtcattcgtctcgctgcatcatcgagatgtgcgtgcgtatcattggtgtgcatgacggtcaggtcccacagtccgtctttaggaggatctggatttgaatcatcatcgaattgcagcttatacacaccatagccttcattcgcagacttgcctacataagcgacatcgtctgctttatcggcaaatggcttggccaaaagcgaggattcaaacgtcagattcgtgccggaaacaggcgcgattgaccagttgttgtctgcttttggattgactgttttttgttcaataatgtaatccatcagcacctgcctgttttcaaccgcagagccgtggacaattttattgctcgtcagatgagggaacccgccgcctccggacgcacgatagttattggtgactacgagaaattcctggcttgggctgatcggcttgccttcataggaaaggttgatgatacgggatgaatccgcattgatcacttttccgttctcattgtatttagccggttttgtcacatcgacctgatatgtgacaccgtcaatcacgtcaaaattataggaacggaaattctcgttcagcaaggcctgatcgccgcctttggctggatcaatttgattgaattggcctgccgacatctccagccagtccttcacttcgctgcctgtcagcttgacgatttgaacagtattatcgtaaaggtacaagtcaccgacatttttaatcgcaagatctccggctggaatgtttgtatagtaattggctccatttctgccgcctgctttaaacggcgctccagcggataaaatcggcaggttcttgtactcggtatccttcatttctttttcggcataccatttttgcgcgtcagtcacgatctgaatggaaggatcatctttgacctgtgcaaagaagctgttaatatctgcttcggttttgccgactggctttcggacatactccagtgtgttttggtgtgtttgctgaatggtgtttgtaacggtttcgtttcttgatgtgacgttgccagcaatagattcaatacttcctttggaatctgctaccttccatgagccgtccgccttttcaagcttgaggtcaatcacgcctaaatatttgccccagctgcttggcatgacgacaggaatgccgttaattgttcccttttccacatcaaattgagcaacacccgcatactcggaggaaggaaagagtccgtgctgatggcccgagataatcgcgtcaatgcctttcgttttagtggcaaggtcaaacacggcgttttctgcgcctgatgattgtgactgcttttcaatgccggtgtgggcgagggcaataatgacatctgcgccttccgccttcattttcgggatcgtttcattggcggattctacgatatcctgcacctgaacttgcccctcgagattctttttgtcccatgtcatgatttgcggcgggacaaagcctatgtagccgacttttactttctgctcattaccgttttcatcaatgagggttttttcattaatcatatacggcgtataacggttttcgccgctagttgttttgacgttggcatttacaatcgggaaatcggctcctttgattgtgccgtcgagaaagtcgagcccgtagttgaattcatgattgccaagcgttccggcgtcgtatttcagcgcattcatgacgctgataatcggatgggttttcgcgccggagataatatcgtctttttgatatttcaccgcgtattcacccagcggattcccttgaatcaagtcgccgttatccacaagaagggtgttagggttttgcttgcggtgcttttggatcaattgcgctgttctcgccagaccgaaatccgccgtttctttgtcgctgtagtaatcgtaatccatcatgttggcatgaatatcagtcgtagccaaaatactcagatgcacctgaggagccgcgctttcttctgcatgaatgggtggtgttgggaggattaggctaagtatcataattgggggcaaaagaatacggagaatgtttctgacgtgtgttcgtcttttctgtattctcaccagttctccacctttcaacgaaatttgtgttacagctcctattgtaagaatattttgtaactatttgtaggtgtttctttatgattattgtaaaagggagaaaaatgagtattatgtatcagtatcaagcgacaaatactgggtatttatgcttatcgtttgtcacaatcgcggaatgtttattttagtgtggctggggtagagtgttttatgtagacatataaagcgggaggttatgaatcatggggaaaaaaattgcagttgttttaacagattattttgaggacagcgagtacactgagcctgcgaaagcttttaaagaagcgggacatgaactgactgtcatcgaaaatgaaaaaggaaaaacagtaaaaggcaagcagggaaaagcggaagtgacggttgacgcgtccattgacgacgtaaatccttcagactttgatgcgcttttgattcctggaggattttcaccagaccagcttcgcgctgacgatcgtttcgtccaatttacaaaagcgtttatgactgacaaaaaaccggtattcgccatttgccacggcccgcagcttttaatcaatgcgaaagcgctcgacggccgaaaagcgacgggctatacgtccattcgtgttgacatggaaaacgccggtgccgacgttgtggacaaggaagtggttgtttgccaggatcaattggtcactagccgcacaccggacgatataccggcatttaaccgcgagtcattggcattgcttgagaaataagaaaaaacggacgcccacgggcgtccgtttttttgttgcttaggcttgagcacctgtcagtttcttgtacctgtaatacaagaaagcagctgcagccgttccgatgaccgcaatgccgaagtcgaatatgaaaatatgagcgatgccccccgcttttgcgataagccctgttgcaatcggcagcagaatcgatgcaagacttgaagcggtcgctacaattccggtaacggttccttttcgcttccagaaaagctctgtcattaacgtaatggtaatttgaaacacacccgcagttgaaaagcctaagaaaaaggcagtgatgtccagcacaactgggatatgaacggtcagcatgactgcgagcgtacataaagtaataataggatataagagcgttatgaagacaggtttgacccatctattcagcaaaacggctaataataaaacagatgccagagatcctatactataatagctcagcaattgtacagatgctgattcagctaaaccggctgctttttgcgcgtagctcgggagccagatttgagaaaccgtaaataaagccgtggatgtaaaaccgatgataatcagtgcggtgccttctttctgaaaaacgggttcagacaagaaaacgggagattcctgttggccgctattagttggtttcttatgttttttaggaaacgaaagcgttgataaataaataatattcaggagatagaccgctgccggcagataaaaagcaaatccgtaaaacatgctgtggtctgctaaaaatgtgatcaaaagcggcaaaagtgcggccccgacagacataaaggccttgaccaagacattcgccgaaccggaagcagtcggaaagagctcagttagggccggatatgttccggcatccatcgctgaatttgcgactccggctaataaggcgaacacaaacgccagctcatagctcggtgataaaggaataccgactaaaaagacggccataattcccgcagaagcgacaacaagcggctttctgccgattttatctgatagaactccggaaatgccgtatgtcagcagtttgccaaacccgatagcggcaatgacataactgatgccggtcggatcggtattccactgttttgttaatgaagacatattggatgcgagaatgatgttgaccatccccagaaagaagtagttgatatacattccggatgctgttttgatagatgtcgtttgcatgcttgtactccttcaaatcttattcgaacactttgctgttttggtttggggaaatgataaaaaagactcgccgagtttccggccagtctccattatttacgaagcgaggctaattcttgagcaatcgcctgcatttcacttgggctgaatgattcttttttcatcaccatgctgtgaaggtacgtgaggtcttcaatcttctcatcactgaaatcctccgctttgattacgccgacgttcagcatgttcagcttttgggaaatctcttcaatcatttgagttaatgtttctgtatttgggctggacaaatggttccatcctttctatgcgcaatataggtatgttttattctaacagaattccatcagaaaaaaaccctattctaaaagcaggctgttcattccaaaaaagtgaagacatcagttgaaaagaaaatgaacatcctactaagatattcatgaaggtttctttttagagaaataggggcaaagaatagggaggttggacaacatgataagcgtgttatttgtttgtttaggaaacatttgccggtctccgatggcggaagcgatttttcgggacctggcagccaaaaaaggattagaggagaaaatcaaggcggactcagcgggaatcggcggctggcacatcggcaatccgccgcatgagggaacgcaggagatattgcgcagagaaggaatcagctttgatggcatgctggcgcgtcaagtcagcgaacaggatctggccgattttgattacatcattgcgatggatgcagaaaatatcggaagtctcagaagcatggcgggatttaaaaacacttcacatatcaaaaggcttttggactatgttgaagattcagatcttgccgacgttcccgatccttactacacagggaattttgaagaagtctgccaattaatcaaatcgggctgtgagcatctgcttgcgtctattcaaaaagaaaaacaattgtgagtgaaaggagaatttgcatgaacaacgaacgtttaatgctgaaagggatatttctcggagctgcggcaggtgcggcgttatcactgctccataagccgacaagacaggcgtgcggcatgagatggctgacatgcaagcataaactttcactgtacaaaagcaatccggagctgttaaaaaacactgtcatcacaaaagtggatgaggccaaaaaactcgcccaaacgctttcaaaggaagtcgactttgtgaaccagcaggtgaaagagctgaagaaaacaacgccgcaagtgatggaactcgtgcaagaaacgaaagagcatttttcaaaaaaatgatcaaacatgcgaggtgagacgacatgagttttttgaaagagcttttcagcagatacacccttcatgaaggacaaagtaaatcagcggagctggcgtatttttttctattgtcactgtttccgtttttgatttttatgctgacgctcaccgcgtatcttccgctttctaccgatgatgttttaggagtcatagaacaatatgctcccgccagtgcgatgtcactcgttgaatccattacccatcaaaccttaaataatcgaaatggcggtttgctgtcattcgggattatcgccgcattatggtctgcgtctaatggaatgaacgcgatcgtccggtcgctgaaccacgcgtatgatgtggaagaaaaccgctcttttatcattgttcgtctaacctcgatttttttgacgattgccatggtatttacgattttagtggctttgcttctgccggtatttggccgggagattggaaggctcgcttctgactttgtcggcgcgtcggatctgtttttatccgtctgggccgccattcgctggggtgtcagcccgcttgtgcttttgattgttttttccgcgctgtatgtgattgcgccgaacaaaaagctgtctctccggtttgtcatgccgggtgcggtctttgcgactatcggctggatcattgtcagcacattgttttcattttacgtcagcacgtttgcgaactatagcgccacttacgggagcatcgggggaatcatcgttctgatgatttggttttacttgagcggcattttaattatcctaggcggagaaatcaacgctcttttacataaacgtaaaaagcttcctgatgaaaatccctaccattagcgcaccctataaacgaacttcggttcaaaaagaagtcggggggatatcgtgatgaccaagcatacgaaaaaaggcggaagccataacaaacaaaattcgaaaagcaaatcgagcaataaaacaagcggaagcgccaacggacaaaacggctaccattagcataaaagcctcctgacatgatgtcgggaggctttttgattaagaagatgaagaataggtttcagccggtgaccagcttttcggtttgcccagcacaagggccagccacacagcgctaagcgtgagagtaatgaagtagaacaagtttgcgctttcaaatgtctgcatataccagccgccggcaaccgggccgaggatgctgccgagactgaatgtaatgccgcaaagcaggttccccgccggcaggaggtgaggcggaagaaggtctgtcatatagctgatgccaagtgtaaaggttgatccgactgccattcctgcaataaaaaagcagccgccgatcacgtaaggcgaaggaaatacaccggcgatgaaaaagcaaagagccccagtcagcaaaatcaccagcagcacattccgcctgccgtatctatcgctgaggatgccgagcggaaactgaaagataatgcttccaatcgcaaatgcgggaaggatgatcgctactgcgtctactgatatccccaaacggagcgcgtacaccggaaggcttccgttcagcgccgtttccagaaagccgtagccaaatgtaggcataaaggcaacccacccaaacagcatggcctgataaaatcgcctgaaactattgtctgatttggtttcatgaggactggtttccgggtatgcattttgtagaaagaaaacaaaaagccacgcaaacagactgatgcagccggacacgataaaaggaagcgacggactcagcttgacaagcggcaccatgaatgggcctgcggcaaagccaaggccaaaggaaagcccgtaaatagacagatttctcccgcgattttgttttgatgacatggaggtcacccacgtttgcgtagaaaagtgaagcatgtggtcgccgattccaatgaacaggcgaagcaggaaccagacccaaactgactgaagccaaataaatccgaataagcttaaaatgacaatgcttccgcccatgacgatcagcggcttgaacccgagctttctgagcggcgcttccataaacggcgaagccaaaagcacaccgatatacagcccggtcgcgtgcaggccgttgatagcagcggattctccatttgtttcaaaaatgattgaaatgacaggcagcagcatgccttgtgaaaacccggaaatggatacgagcaagacaaggataaagaaatgaaatcgtgacatcgtgtcagttctccttatatggaatctatgttgatcgtacaatgttttccaaaagcaggcaacctgaaaaaagcctatatcacgctatacatttgccctcgtgtaatcatgaaggtttttgtgaagaataaaaataaaacaagtcataaaaaaggagctatttcaccatgaatcgtatcttttttattttagtggcggccggtgttccgctttctgtgattggcagtttgatgcattggccttccgcggttctatttgcagtttattgcgtgacgattatcgcgcttgcaagctatatggggagggcgacagaatcactgtccatcattgcaggaccgcgtatcggcggtttgttgaatgccaccttcgggaatgcggtggagctgattatttccctttttgcattaaaggaaggcctgacaggaatcgtgcttgcctctttaaccggttcagtgctggggaacctgttgctggtagcgggcctatcgttttttgtcggcggtttaaaatataagcggcaggaatttaatatccatgatgcccgccataactccgggcttctgatttttgccatcattgtcgcctttgtgattccggaggtattctctgttggtatgggaaacgccagcaagctcaatttaagcatcggcatcagcatcattatgattctgttgtatgtggcggcgctgtactttaaacttgtcacgcatcggggcgtttatcagccgaataatgccgctcagactgaagaagaggaagagccggaatggtcagggaaggttgcgacgattgtcttgtttgcggcaacgattgtggttgcatacatatccgaaaacctggtccatacctttcactcggttgctgaacagttcgggtggagcgagctgtttatcggggtcatcatcgtggcgattgtaggaaatgcggcggagcacgcgtcagcgattattatggccttcaaaaataaaatggacattgcggttgaaattgcagtcggctctacgctgcagatcgctatgtttgtcgcaccggttctcgtcatctgttctatcttttttccgacaagcatgccgcttgtatttacattgcctgagctcgtcgcgatggtatcagcggttctcttgatgatcgcgatttcgaatgacggggattccaactggtttgaaggggcgacactgcttgctgcatatgtcattatggcgatcggctttttccttctttaacctgaaaaaatgatggataacaacaaagcgggatgaaaagactaagggaaaatgccatagaaagagtgatatgatgaaaaagctatttcattccacacttatcgtgttgttattctttagttttttcggcgttcagcccatccacgcgaaaaagcagtttaaggttcctaattctgtcgcaagcatttcaaaggaaaacacgtatccgaatgcttcacaggatcagccaatgcttcagccgagcaagctggcaaaggaattgctcgatcattctgaggtgaagattgaaaatccgcatctcatcaaaatgctgaatgaatccaacatatccggcacaccgcttgcagtagggtatcgggcgacaatatttctcgggaaatgggcgctcggctatgaatcaaatgaaacagtcgcaaactgggaatataaaaaaatcaatacaaaccgtgcggataaccgcggcgggaaagaaacggctgaaatgcattatgcccaggaacagcagtacagagtgaagggcggcctgacagctaaagttccaaatgctgaagatgtcaaaagcatgatgatgcaaaaagcaatgaagaaaacgaaccttccgcttgcatttgagacggtcattggggctggcacaaaacgggatcagatttataaagtcgctcctaaaaaaatcggttatttacatgcatatgcaccggctgtgaatgaaaaaggaaaagtgacttacggagaagtgtacttagtgctgaaaggaaataaacgaaaactcgtcgtgaaaaatgtcacgtcacagggcatcggtgcgtggattccggttcaagatcatgtcacatttggctttcagctttcctcactgccaagataaataaaaaactgattccaactcggaatcagtttttttgtttattgggttctctcgattcggaccgcttcctcaagcatttgcacattgttttggtagagctggcgaacgagaacccgtctgactgcaaggctggcactgaaataatcatcatctttcaccatgcctttaaccgtaaattcgacgccgcgattgattttattcaatgcggtgatgccgtggatttgaaacggttctgtcggattgccgaattcatcccgcttcaatgaatcacgaagctcttcattcagcatgtcacatgcctcttccaacacgctgtacacgcggtccggatcttctttaaagctgataagaaaggattcggtaatccgcataaaatcaatattatagttctctatttgtctgacctcgccgttgctgatggtgagcagcttcccgctccattcccggatttgcagcgagcggaggccgatttcctccactgtcccgttgaacaagttgttgacggtgacataatcgcctttgtgcagctggcgttcatatattaagaatacaccagccagcacatctttgatcagcgattgggcgccaaaaccgatcacgatacctgctacgcccgccccggccaatatcttgccgaaatcatgcacaaataaagaaataacgtaaaagataaaaccaattgttgccgtatactgggtgacagaacggacaaggctttcaatcgttttttcctttttttcttcaataaaatccgtccgtttaaaaaatagctgtaccagccggttgatgataaagacaccgatccaaaggataacggcaacgaggagaatatcgacgattttattttgaaaaatctccgtaagtgtttctttcatccgcatctaactcctggcttgacgttttgtgaagtctgtatcctgataataactgtttttgacaagaacattcggtccgaggcaccggacattcgggcagtggcaacttagttccttcgcaagcttggtctctctccacttttcataggcggaagggaggctgtccgtctgaatgttgccaagcggcggggtatcaccgaaatcggtcacgataatgtttccgtcgaaaatgttcacattcaggcgggatcggccgtcagggtcatttcgcactgtgacgtttttcgccgcgcgaagccggcgaagcagcttttggtcgtcttcgtccggactgcaggcataaaacggcagcgttccgaacagcatccacgtattttcatcacgaatatccagcaagcggtgaatggcctgtctcatctctttcaggctgagggattcaagagcgcttgcgaaatcgcttggatacattgggtggacctcgtgacgctgacatttcatatcttctgtgatttggcggtgaatatgctcaatatgcggaagagttcgtttgttcagcatcgtttccgcagataccattactccggcatccacgagcgtgcggctgttttcgatcattttttcaaaatagcgcgcgcgctgttcgaaggtcggttttctgtccatcatggcaaagccgatttcagcaaaatcttcaactgtaccccagttatgagaaatatgtagcacatcgagatacggaatgatccattcgtaccgctcgatgtcgagggtcagatttgaattaatttgtgtccgcacaccccgttcatgggcatatttcaataaaggaacaacatattcttttactgatttcagcgaaagcatcggctctccgcctgtgatgctgatggatctgaggcgcgggatttcctccagccgttttaacagaagatctattggcagagcattcgggtctttaggctgcaatgtatagcctacagcacaatgctcgcatctcatattgcacagtgtcgtcgttgtgaattcaacgtttgtcagctgcatgtctccgtattggtcaacatccatataggcttcccaagggtcaaactcgggcgtaatcggacgcagcttcgtgttttgtgtcatgactatctaactcctttataaatgggcatactaacgctgccaacagttaattttagacctgatttgccaagatcgcaagtagcgcggcgattgaaaaacggcaaaaaatgagctaccataataaaaaatgaatggaggaacagaatggggaacgccgtaaacaataaagatcagcagattgattatttaaagaacagacttgacatgtttatgaacgtcatcgattcattagaccctgaagcaaccgacgttgaagatatagacaggcttatcagcatgcttgatgacctggaagccaaatacgaacgttttaaaaaagattgggaataaaaccgcgtgcccgccgcggtttttttattggcataaagcaacagtataaaacaaagcccctatctgtaaaataagaaaaaatgcagaaggagcgctggccatgaagtggatgtgttcaatatgctgcgccgccgtattgcttgccggaggtgcagcacaggcggaagcggtgccgaatgagccgattaattggggctttaaacgaagtgtcaatcatcagccgccagatgccgggaagcagctgaacagtttgattgaaaaatatgacgcgttttatttagggaatacaaaggaaaaaacgatttacttaacgtttgataacggatatgaaaatggctatacgccaaaagtgcttgatgtcttaaaaaaacatcgcgtaacaggaacgttttttgtcaccgggcatttcgtaaaggaccagcctcagctgatcaaacgaatgtcagatgagggccatattatcggcaaccattcctttcaccatccggatttaacgacaaaaacagctgatcagattcaggatgaacttgattcagtcaacgaagaggtttataaaattacgggaaagcaggacaacctgtatttgcgtccgccgcgcggcgtgttcagtgagtacgtactgaaagaaacgaaacgcctcggctatcaaaccgttttctggtcggtcgcttttgttgattggaaaatcaacaaccaaaagggaaagaaatatgcctacgatcatatgatcaagcaggcgcacccgggagccatttacctgcttcacaccgtatcgagggacaatgcagaagcgctggatgacgcgattacagatctgaaaaaacagggctacacatttaaaagcattgatgatctgatgtttgagaaagaaatgaggctgccgtctttgtaaaagagaaagacctctccttaaacggagaggcttttctttattttatacatttaatcagtgcggcccagtccagatccccgaagcctttctcaatcccgttttcaaaatggcttttggccagctcggcaagaggaagatttgcagaaacccgttttgcggcggcgagtgccaggttggtatccttcagccctaaagacattttgaagccggccggctcaaatttctgctcggccataatggttccgtaattttgatagactggagaaccaaagagcgcgctggcgatttctaaaaattgtttttgttctaagccgtatttctccatcattaagaaggattcagataacgcctccagcatagacacgagtaagaaattgatgctgattttcgctgcatttgctatcttgctttcttcgccgacgtcaaatacctgctggctgaggctgtcgagcagaggcttggcggtttgcttcgcttccgccggtcctgctgttatgatgcgaagcgcggctttggctgcggcatccggtctgccaaggacgggagcggcgagaaaggattgtcctttctctgcatgagccgctgcgagcttttctgagaactcaacactgattgtgctcatcgagatgtgaatgccgttctctgctaatccttcaagcagcccgtcttctccgaatgtcacggtgctgacagaatcatcatctgcaagcattgtgatgacaatatcagcggactttgccgccagccgcggcgtatcagctgcctgtgcgccttctgtgacaaggtcttctgtcttttgtttcgtccggttatagacagtcaattcgtagcctgcttgaagaacatttcgggcaatgggctgtcccatattgccgagtccgatgacagcaattttcaatctgatcactccctgaatattttttccattataaacaatatgaacagaatatgcatagcgatcggcttataacaaaaaagaacagcttcccgctgccctcatttaaaaatattgaaccatcctttatgtacaaaccaaatcagcatcccgattacaagcgcagccatcaggccaagtacagcaaaatatccgtatttccaatgcagctccggcatgaagtcgaaattcataccgtatacaccggcaataaaggtgagcgggatgaaaatggttgatacgatcgtcagtgtcatcataatcgcattcatccggtttgagtttagcgtcacgtagctgtcacgcaagtcagacgtcatgtcacggttggattccacaatttcagataactttaacaaatgatcatatatgtcgctgaaataggctttcgtttcccgctgttctttcacatggtcaaggcttaaaatccggtagagcaaatcacgcatcggaataatcgtccgtctcaaatgcaataggtctgttctgagatcaaacacctcgttcatcagcgttccatacgttttgtggggacggctttcttcaatttcattcagccggtcttcaattttatacacgagaggaaaatattcatcaacaagctgatccatgatcatataagaaatatgcccgggcccttttttcaatatatccggtgaagcatacaaacgctcccggactttagcgataccgggcgtttcgtgtaaatgaaaggtgacgacaaatttttcgccttgaaagatatcgacttcctccgtctcaagtgtttccttattcagcgcatgaatcacgtaaaaacgatagccgtcataatggtcaagcttcggccgctgcatatgctggaagcaatcctcaatggcaagcgggtgaaaatgaaaaaaatctctcaataacgccgtttccgtatcctccgggccgtaaaaatcaacccagtaccatgcaatatcaggctgttccactcgttcgatcggtatatttttcagcagctgatgctctgttgtgattgcggtaatgttgatcataaacaaccctccacctgccattatatcatgcggtctttatgagaaaagtatacggtactctctgcctaattcaagcggcatgttatactgaacaaaaacggaaaaaagggtggatctcatgtggaaggaaaaagtatctgtcacgcctccgtatcattttgaccgcgtgctggacaggctgtctttagaccccctcaatgctgttgatcgagaggcgagggaagtccgtgtgccaatcagaaatcaagcgggggacgtatgtattgtaaaggtacaggcgttaggccatgcgggcgagcctgagttcctcgtcagcggggaaacggatcagggagaaatgatgaaggaaatcaagcggatttttcaatgggaaaatcatttgcagcacgttctggatcatttttcaaaaacgagcctgtccgccatttttgaagagcatgccgggacgccgcttgttctggactacagcgtgtacaactgcatgatgaaatgcattatccaccagcagctcaatctttccttcgcttacacgctaacagaacggtttgttcatgcgtttggcgagcagaaggatggcgtgtggtgctatccaaagccggaaacgattgcaaaactcgattatcaggatctgcgtgatctgcaattcagcatgagaaaagcggaatacaccattgatacatcaaggatgatcgcagaaggcacactcagcttgtcagagctgccgcatatggcggatgaagacattatgaagaaactgatcaaaattaggggtatcggcccgtggaccgtgcaaaacgtcctcatgttcggacttggccgtcccaatttattcccgcttgccgatatcggcctccagaatgccatcaaacgccactttcagctggacgataagccggcaaaggatgtcatgctggcgatgagcaaggagtgggagccttatttaagctatgcgtctttgtatttgtggaggagtatagaataattcgtctgacaatgaaggaaatcctgcaaacgtgttatactagaaagatgtgaaaaaaccatttcactttctgccatccgcagaaagcttcatatagaaacggagagaacaacgtgaaccaacaaaagaaacaggcgcccgtcgaactgaaggtcggacaaacctttccgctgacgattaagcgtctcggcattaacggagaaggtgtcggctattttaagaaaaaagtcgtcttcgtgcccggcgcgcttcctggcgaagaagttgttgtgcaggccacaaaggtccagccgaagttttcggagggccgcattaagaaaatccgcaaggcatctgagcaccgggtggcaccgccttgccctgtttatgaacaatgcggcggatgtcagcttcagcaccttgcatacagccagcagcttcgggaaaaacgcgatatcgtcattcagtctcttgaacgccatacgaagtttaaagttgaaaacatggaaatcaaagaaacgattggcatggacaacccgtggaattaccgcaataaaagccaattccagatcgggcgctcgcaaagcggcagcatcatcgccggcttatacggccttgattctcatgacatcgtgccgattaaagactgtatcgttcagcatccggcaacgaacaaaacaacaggcatcgtccgccgcattttagaggacttcaatgtgtctgtttataatgaaagaaaacgaaaaggtgacgttcgcacgatcgtgacgagagtcggctttgaaacaggcgaagtgcaggtcgtgcttgtaaccgcaaaagaaacgcttccgcacaaggaagaaatcgtcaaagcgattcaaaagcgattgccagaggtcaaatccattattcagaatgtaaacggggcgaaaacttcagtgattttcggtgagaaaacaaaaccgctcgccggaaaaacagtgattcaagaagtgctcggcgacgtatcttttgaattgagcgcccgcgctttcttccagctcaatccggaacagaccgtcaagctgtatgatgaagtgaaaaaagcggcgcagctgaccggaaaagaaaaagtcgttgatgcgtattgcggcgtcggcactatcggcatgtgggtggcggacggagcgaaggaagtccgcggcatggacgtcatcaaggaatcaattgacgatgctaagaaaaacgccaaaaaacacggcatggcaaatgccacatacgtaacaggaacagccgagcactggctcccgaaatggacgaaagaaggcttccgcccggacgtcgtcattgtagacccgccaagaacgggctgtgacagcacgttcctggacacgatcaaaaaagtcaaaccgaaacgctttgtctacgtttcctgcaatccatccacgcttgcgaaggatttgcagacgctgtcgaaggactatcgcgtggactatatccagcctgtcgatatgtttccgcagacggcgcatgtggaagctgtggcgagacttgtattgaaatcgtctcattaattcctaatcagatctggatttcggcagaatgaacattgccgatttccgggtctttttcgtgcatagcccttgtcctaactgtctgttctcaattttatcttccttctcattctcggagatctttattttaactggcgaaaagagttgaaaaaacgtgttgaaaagcgggtgaaaataagcgttatttaaccgggaaaatatcctcccagtatgattaaaatacatgagtaaaataatgtaaaatcatagatatattttcataatttgtaaaattatatattgacttgcagttattatgtgtgaaatattgattataggaatataaggaaaggtatggcgtatatcatttcaagagtcattcgatgtaaaaagttgaaacattgtaattaaatgaaagaggtgaaaatgatggccaaccccattttaaaatgaataatgtatgagcactacaacaattaaataatagtgccgacgataacaactattacagtaatacctacaatggttatatccttgcgacaatcatgcttcataataatttagattgacacttggctaaaaagtattgcagagaaggaaatggataactaaatggataaagtatataaaaaacgaccgttatataaaagaagttggtttcaaacatttttggcatttttagtatctcagctttattttaattttgtagaattaacgggagggggtcctaagtatagagaaatgaatggattcccagcaaacatagttgaactagatttctttcaaacatatctttcattctatgataatccatggtttaatattattactgttttcttgggagttttcactattatacaaataattacaggggtaacaaaggatattcgaaattaaagcaataacttctgatgccttatttaataatgaaagaaaatgtacactttcttaattatcttatgagtgaagactgcgacacttagtcagcagtctattttattggttctggatcaggcttaccgaattataaccctatacaaatatatagtaggttgccacttgctgcgttggttattttctaaatcatgagcaaatgccaaatgattcagattgaagttcttgaattcttttaaataaggatttattttctcttctcatcctctttactccatgtgattcataagtggtagcagcttaagtagagttttttttattctcttgagtactcagttataccacccccaactcaatttgcttaatcaaagtttatctcttgaaattagtttttccgcaaatatgatattgagatacggatatggtgtagcgttaaatatcttatcctcaataacaggacaattagtttgcgttggtaatatggagaactcatatgatattctatttaggttggaatcctttttatccaaaaagttcaaaagcaaggccactaagaaagacgaaggtcagcgccagtgttaaccacaatataaaaaatagggtagctaatcatcccacgtgaaatgttcaaaatttactatagattgataagaaatgctttcgcatgcgataagtgtaaaagaagcatggtcagttttttaatattgagatacaggtatagccgtatcccctaatgaaaggatttgatttttgttatgacagaaaatttctggcgtgaattaccacggccgttttttgtactggcaccaatggaagatgtgacagatgttgttttccggcatgtagtaagtgaagcaggcagaccggatgtgttttttacagagttcacaaactcagagagctattgccacccggatgggaaggatagcgtgcgcggccgtttgacttttacagaggatgaacagccaattgtggcccatatatggggagataagcctgaaaacttccgtaaaatgagtattggcatggcagagttaggatttaaaggactagatatcaatatgggctgccctgtgcctaatgtggcacagaacggtaagggaagcggtcttatccgccggccggaagttgcagcagagttaatacaagcagcaaaagcagggggattgcccgtaagcgtaaaaacaagacttggtttcacggatgtagacgaatggcgcgagtggctgacacacatactgaaacaggatattgccaatctttctattcatctgcgcacaagagcagaaatgagcaaagtagatgcgcattgggaactcatcccggagattaagaaacttcgtgacgaggtggcaccagatacattgttaacaataaacggggatatccctgaccgccaaactggcttaaaacttgctgaacaatacggtgttgatggaattatgattgggcgcggtatttttacaaatccatttgcctttgaaaaggagccgaaagagcatagcagcaaggaattgcttgatctcttaaggctgcatctggatcttcatgataagtattcagcattagaagcgcgtccgtacaagcctcttcctcgctttttcaaaatttaccttcgcgggttccgaggggcaagtgaattaagaaatcaatgcatgaacacaaagtcaacagatgaagtgcgtgcattgctcgatgactttgagagaaagtatcttgatggtttagagtaacagcagtgcttgattcaaaaaaggctaacaccattcttgactaaaataaacctggatgttcggtaaaataaacaattccgatttccgggtcttttttgtacgcagcttttactcagcctgtcttttctctaatttattgtaagaaaataatggtatatttagtggagataacttataaagggggagaggaaaatgaaacgactatgcatcatcccctgcggcaagaaaaaaatctgggacgtccagcctgatgccgggccggtaagagcagaggacgcttatctcagcccgtttcatcaggtgtgcgagcggtatgcgaaagcatttttcgatgagtgggtgattttgtctgcgaagcacgggttcctccgccctaatgatctcgtttcgggaaattacgatgtcacttttggcaccggtcatccggaaatcatgacagcggacgagctgagccgccaatttcacgaaaaaggcttttctgatatcgaagagctagtcatgcttggcggaaaaaaatatcgaagcgttctaaacgccgtcatcggagagcaccagcatatcagctggccgctatcatcatacaaaggcataggctacatgctccaagcgctgaaccgagctgttgaagaaaagcatgaactgtagcacgtatataagaagaaaagagtgtgaacatgaaaaaacttgtgtttggcttgcttgccattgcgttattcggatgcggactatatatctatcatgtatggttcggtgatccattttcgaaaaatgctgcagaacagaagctagtctcttatgtgaaacaaacctatcctaagaaagaaatcaagatcacgaatggggtatataacgctaaaacctctgaatatgtattcgaagcaacctcccaatctcatcgctacccaatgtgtacgaagggatttctgcatcctaaagtaacgtgcgatggaattgaagaagcgtataccgaatcagtatcaaaacatgtaaatgaagaagcaacgaaggcaatcgaagcagatctgaaaaaagcggttcctcgacttataaaagctgatgctgctttgagtatcgaaaacggacagttcacgttagatacaaaatggaacaaacagctggctgaaaaagcgcctatgagcatgacgattcagttagacgccagcgggttatcaaaaacagatgccgcaaagatggcggaaattgtcagaaaaacgcttaatgaaaagggatatacatactcaaacggcacgatagactgtatgcagaaggacggggacggcggtatcggatatgtcaaatattcaattgattttctttcaaaagcagctattcagtcaaacgatgcagaggaactaggaagttaaaaagatttccaaggaaataaatacgtcgatcattgtcaaaggccgggtgatatccggtctttttttttgcatgctgtaaaacgagacaaatgaatcagtttgagacaaaacgagacacacgtctcaaactgtctccaaagtgaagacgagaagactgattttacgggctcaaaagactggcacacttcttgcatttataatggtgaaccctaaatagaaggaggcgcacaaaatgaaattgttaaaacgagaaggcttgtcattaactgaggaaaaagcgctgtggatgtaccaaaagatgctggagatcaggggctttgaagacaaagtgcatgaactgttcgcccagggagtgcttcccggattcgttcatttatatgccggtgaggaagccgtggctgtaggggtgtgcgctcatttacatgatggcgacagcattacaagcacccacaggggacatggacattgtatcgccaaaggctgtgacctggacggcatgatggcggaaattttcggaaaagcgaccggattgtgcaaaggcaagggcggttctatgcacattgcggatcttgataaaggcatgttaggcgcaaatggaatcgtcgggggcggctttacgctcgcatgcggatcagcgctcacggctaaatataaacagactaaaaatgtaagcgtttgctttttcggggacggggcaaataaccaaggcaccttccacgaagggctgaatttagcggctgtatggaaccttcctgtcgtgtttgttgctgaaaacaacggctatggcgaagccaccccatttgagtacgcatcagcctgtgattcaatcgccgatcgggcggctgcttataacatgccgggggttacagttgacggcaaagatattttagcagtttaccaggcagccgaggaagcgatagaaagagcaagaaacggcggcggcccgtctttgattgaatgtatgacctacagaaactacggccatttcgaaggagatgcccaaacctataaaacgaaggatgaaagagttgagcaccttgaagaaaaagatgccattcaaggttttaaaaactaccttttaaaagaaacagatgctaataagctgtcagacattgaacagcgtgtcagcgaatcgattgaaaaagccgtctcgttcagcgaagacagcccatatccaaaagattcggagctgctgacagatgtgtacgtgtcatatgaaaaaggaggaatgtaagagatggcgagagtcataagcatgtcagacgcgatcaatgaagcaatgaagcttgcgatgagaagagatgaaaatgtgcttttgatcggtgaggatgttgccggcggagcggctgttgatcatttgcaggatgatgaagcatggggcggtgtattaggagtcacaaaggggctcgtacaggaattcgggcgcacaagagtgctggacacaccgatttctgaagcgggctacatgggtgcggctatggctgcggcatcaaccgggctgagaccgattgcagaattaatgtttaatgactttatcggcacatgctttgaccaggtgatcaaccaaggggcgaaattccgctatatgttcggcggtaaagcgcaagtgccgattaccgtccgcaccacatacggagcgggatttcgggccgctgcccagcattcacaagcgctgtatggccttttcacgagcatcccgggactgaagacggttgttccatccagcccgtatgatgccaaaggtctgctgcttgcagcaatagaagacgatgatccggtgttcttctttgaagacaagacgtcctacaacatgaagggcgaggtgccggaagattattatacaattcccctcggaaaagcggatatcaaacgcgaaggcaatgatgttacgctctttgcagtcggcaagcaggtcaatactgcgcttgaagcggctgcacagctttcagagaggggcatcgaagctgaggtgcttgatccccgcagtctgtctcctctggatgaggatgcgattttcacatcgttagaaaaaacaaaccggctgatcatcattgatgaagccaatccgcgatgcagcattgccacggatattgctgcgattgtcgctgacaagggctttgatttgcttgatgcgccgattaaacggattacagcgccgcatacaccggttccgttttcaccagtgcttgaagatcaatatttgccgacaccagataaaattgtcagcgtcacgcttgaattgcttggcgagccggcaatgaattaaaggggggacacaaatggcggtaaaagtagtgatgccaaaattgggaatggccatgaaacaaggggaagtatcgatatggaataaaaaagtaggcgacccggttgaaaagggagaaagcattgccagcattcaatcggagaaaattgaaatggagatcgaagcgcctgaaaaaggaacgctgatcgatatcaaagtgaaagagggagaagaggttccgcccggcacagctatctgctatatcggggacgccaatgagtcggtgcaggaagaggcgagtgcgcctgttgctgaagacaatatgccgcaagccgttcagcccgtcaaacaagaaaacaaacccgcagcctccaaaaaagatcgaatgaaaatatctccagtcgccagaaaaatagcagaaaaagcaggattagacctaaaacaactgaaaggaactggaccaggcggacgaatcgtgaaggatgacgtaacaaaggctcttgctgaacagaaaaaagatcaggcaaagcctggttcggaacagaaagcgcaggaaatcccggtgacaggcatgagaaaggtcatcgctgcccgaatgcaggaaagcctggcaaacagcgcgcagctgacgatcacgatgaaggctgatatcactaagcttgccactcttcaaaaacagctttcatcaactgcggaagagagatacggcacaaaactgacgatcactcattttgtctcaagagccgccgttctcgctctgcaagctcaccctgtgctgaacagcttttatcaaaatgagcgcatcatcacacatccccatgtacaccttggtatggctgtagccttggaaaacggcttagtggtgcctgtcatccgccatgctgaaaagctatcgctgattgaactggctcaatcaatctcagaaaatgccaaaaaagcacgcgagggacgtgcgggaagcgaagaactgcaaggctctaccttctccattacaaaccttggcgcgtttggagttgagcatttcacaccgatactaaatccgccggaaacaggcattctcggcatcggagcaagctatgacacgccggtgtatcaaggggaggagatcgtcagaagcacgatcctgccgctcagcctgacatttgatcacagagcgtgtgacggcgccccagccgctgcattcctgaaggcgattaaaacatatttggaagaacccgcagcattaattttataggaaaagcaggtgaaaacgacatgacattagccattatcggcggcggacctgcaggctatgcggctgcggtctccgcggcacagcagggcagaaacgtgctgctcattgacaaaggcaagcttggggggacctgcctgaatgaaggctgcatcccgacaaagtctttgttagaaagcgcaaacgttcttgataaaatcaagcatgccgacagctttgggatcgaacttccggcaggtgcgatatcagtcgattggagtaaaatgcaaagccgaaaacaacaggttgtcagtcagcttgtccaaggcgtacagtacctaatgaagaaaaatcaaatacaggttgtaaagggaacagcctcctttctttctgaaagaaagctcttaatcgaaggagaaaacggaaaagaaatcagagaggcggaccaagtattgattgcctccggatcagagccaatcgagctgcctttcgctccgtttgacggcgaatggatcatcgacagcaaagacgcgctttctctttccgagattccgtcttcactagtcattgtcggcggcggtgtcatcgggtgtgagtatgcagggctgttcgccagattgggatcgaaggtgaccatcattgaaacagcggaccagctgattccggctgaagatgaagatattgcccgtctctttcaggagaaacttgaggaagacggtgtcgaagtgcatacttcatccagattagagcgggtggatcaaacggccaaaacggcaatatggaaaagcggtcagcgagagtttaaaacgaaggccgattatgtgctggtggcgatcggcagaaaaccccgtcttgacggattacagctggaacaggccggagttgatttttctccaaagggcattccggtgaatgggcacatgcagacgaacgtgcctcatatttacgcgtgcggagatgctatagggggcattcagctggcgcatgccgctttccatgagggcatcatcgctgcttctcatgcttccggaagggatgtcaaaatcaatgagaaacatgtgccgcgctgcatctatacgtccccagaaatcgcgtgtatcggaatgacagaacgacaggcaagaagcatatacggggatgtgaagatcggcgaattttcattttccgcaaacggcaaggcgctcattaaacagcaagcggaaggaaaggtcaaaatcatggctgaaccggaattcggcgaaatcgtgggtgtctcgatgattggcccggatgtaaccgagctcatcggccaagcggcagcgatcatgaatggtgagatgacggcagatatggcggagcattttatcgccgcccatccgactttatcggaaacattgcatgaggcgctgttaagcacgatcggccttgcggtacatgcataataaaggaaaaagcaggcgcatggatataaggcgccggcttttttattgttgaaagcgctttatttttcccctacaatagatgaaaacggcgtgtaagggaggagcgatcaaggaaatgaattcggtcccaaacgatttgcaaacctggaaacgttttgtgaaagacggtgtgcttgacgaagcccgattaagaaaacggattgcagagtcatggcatcgctgcaaaaaagctgaggtcaatccttatttagaaaaaggcccgaaggttttacagcaaacggagctggatcagcagtcaaaaaaacattcattcttcttgacgaccgcaaagccttacctcgaaaaactgctgcctgccataaaagaaatggaaatgatggcgctgctaattgatgcagacggtgttgttctggcattggacggccatcccctcgcgctctatgaagccaaacgcatcaactttgttgaaggggcatgctggacggaaacggctgtcggaacaaatgcgattggcacggcgctccacatcagcgagccggttgcgatacaaggatcagagcattactccattgcttcccatctttggaactgttcagccgctccgattcaccatgaggatggcagccttgcgggtgtgattgacatatcgtgtccggcggcaggcgctcatcctcatatgctcggtattgccactgcgatcgcctatgcagctgaacgggaacttgcagctaaaagccgtgagaaagagctcgagctgatcagccgttttggagagagggctgcatccagtgtgccgatggtgctatgcaataacaagcagcacatcatcagtgcgagcataccgattcgaacctcaatgcctgattggcagggccggcacctgtatgagttgaaggaacggggctactcaatcgaaaaagctgtcaccataggagatggcggcacttgtttttatctttcggaacaaaagaaaaagaaggtgttccgattcaatggagtgatcgggaaaagcggccgatcgcaagcgatgctgatgaaccttgaacgtgcagctgcggcagatgcaacggtctgtttgtcgggcgaaactggtacgggaaaggaagtcgcggctcgcgctcttcatgagaacagtgagagacgtcacggtccgtttgttgctgtcaattgcggagcgattccgtctgatttgattgagagcgaactgttcggctatgcagagggcgcttttacgggagcgaaacgaaatggctataaaggcgcctttcaaaaagcaaatcaaggcacattatttttagatgaaatcggagaaatttcccactcgatgcaggttgcacttttacgggtgcttcaggaacgcaagataacgccaatcggcgggacgaaagaaattccggttgatatcagagttattgccgccacacattgtgatttacgcgagcttgccgaaaacggaaaaatcagagaggacttgttttaccgtcttcatgtctatccaattgaactgcctccattacgcgatcgcaccgaggatatcccggacctctttgagtactacaaacagaagaatcattggccaggcgaacttccttctgatttttgtcatgtgctgaagcaatggaagtggccggggaatatccgtgagctgtttaatgtgtttgaacgtctttctatcagatttccggacggccggctgagggatgaaccgcttcccgctttactggaagccgctggattgccggccagctctgcagaaaaaaagccggctgctgccggcgtgcttacctttcgtgagcaaatccaaaaggatatgatgatcaaagcgcttgaatctgcaaaaggaaacgtctctcaagctgccaaaatcagcgggattccccgaagcactttctacaaacgcctgaaaaaattcaacttgtccgctgaatcgtaaagcatacttccttcaggaaatggaaacgttatgtattgaaggagggtgttacgatgaatattcaaagggcgaaagaaatagtagaatctcccgatatgaaaaaagtaacatataacggcgttcctatatacattcagcacgtgaatgaagaaaacggaacagcaagaatttatccgcttgacgaaccgcagcaggagcatgaagtgcagctgaacagcttaaaagaggattaaacaaaaatggcccgcttcataagcaggccattttgttatccgcgcggcgcaaataaaataacacagacaccgatgagacaaatgaatgcgccgatccagtcatacagatcaggtgttttccggtcaacaagccatccccacaggaccgcaagcacgataaatactccgccataagcggcgtatacacggccgaaagatgggaaggactgaaacgtcggaagaatgccgtatacaatgaggatcagcgccccggcgattccatagccggctggctttgcctctctcagccatagccaaaccagatatccgccgccaatttcggcaagccctgccgcgagaaataaaagaatggtaatcagcatcatgagcactcctcaatttgcatttatctttcattatagaggaggagagcttttaaagcttcggatgattctcaaattccttcaaatacgcttttcgctgaacctctgtaaattggctgatccaattgttttgagcctcttcattcaaatggggaaggacatagcgttcaaccgcttcgaaaaacagcggattcgcgatgatgttccaggtcgggatgcgaacgattttcccgtctgttttctcgatgataatatcctcaaaaaagatccctttcagactgtattggtgacgtcccatataaagccgcttcacctcggaaaacagcacgctgcgctttctcgagaagatctcgccactaggtccggtctttatgctgaaaatgacatttccacggcttgtgaacgcaggaaaagccataaagaatgtgatcaatccataaattatcgccagtaatccgccgcccaaataaagcagggcatatttagattcaaacgtgagagcttcagccaccagccagactcccacaataaaggcgccccctgtagcgaggaacagccatattctaaaaaacagtctgcttttgaccttaatgacttcattgtttttcaattgctattctcctttatcgctctttagcaaaaagtattccttttatcacatctttatttgctgttacgatagaaaattcattttgggtaatacctgttaccagccaagtatgacggctgccaggcaggacgaaagccatgtcagctacttctggggagttgtctttgtcataaaccagccgcatcagcgtatccatttttccttttcgcaaagccagatcatttacaaaacgggtaacgtcctcttggtgatcatgcttatctagaaactccttgagatgtgtgggagtgtctgaagcgccctccaaaagcaattcaaattcagttgatgtcagagagagcattgattctttgtgatcttctgcatctattatatttaaaaactcggatgttttagagagtaatccattagttgaatccatttttttgattctatgcacctgttcatcaaacagcaattcatgagagtaagtgccaaactttgaaacatggcaggatatattctgttctttgccttgttcatcaaatttggacagcttcactgtatagtccgcgtcgtttaacacatggataaacggacagtattcgtcctttagccgatattgatgattccgatattccgcagcgtccttggctaagagtgagcggcacgcggcttcaaataaggcgccgagctgttcatcttctatttcgggaaaataggcttgttttaaggccattccctgttcgaaaaacccttcgctgtaaaaacaaaacaagagttcttctatgctgattgtaaactgcttcattgtttattctcctatccaaatgaaaatttccctttaaggaaatgggttgcgccgtgtatgagcgaatccgctgttttctttgctttttctattccttttttcgcactgtctatccctttatgtatcgttttattcgccgcatctatgccgtcattcactgatttgacgactttgccggctgattccagtccttttttggctgtatcaacgacagcatggatcggttctttaagttttatcgctgctttttcagcatagactgatgtgaattttgcgattttttccccaacaaaccctcctactgccgaaccaattgtgcctccgattactgtgcctacaggacctaacacacttcctacggcaccgcccacaacagcaccagctgtcgcaccgcccgcaataaaaatggtgttattcacagcatttccgacagccttggcgttttcacgcttgagaacttcgggtttattctggtattttgcataattttcagcaattttcacgcctgctccgaatgtttcggtcgcaccggtaatcagtgtggcggtaatggcatttcctttcgcgaatctcaagcccgtttttcccacatccttcaaagtggagcgtacgccggcttcattaagaaatccttttgtgtagcttctgacgctgtttgaaaaatccaccgtgtcctgagggaagtattttgtaaactttttatgtaccaaatctgaaaatggacggttggtcttttttaacaaatatttaggattcaaaagcactcttgccgctttttgataacgtgagctgtcaacggccctggaaatatccaagagcagttttgagtgctgggctgtatgcaagccgcttggctgtttcacaaatttcgtaagccctaatccgtaatattttccctgcgtcagcataagagcggttaagcttgtcatcgtaccgtatttgtcgtaggcattgtagagctttcgcaaaatatcatcttgttccacaaatttatcgcctgtttttctgatgaaaatctcattgtcactcagcttagtgacgagcgcctttcctgagctccacgcatcgcccactccagaaaaacagctgctgtagcggggatcgcattgcaaaatcatctgccccagctccacatgcaggtccttatatttgttttccatatcagttaattcagtgactacatcatttgcaagctgttcgagcttatccggatcaactgcaatgtttcctgacacaccgttcacctcccgagtttatgtctttcctctcttgctttacgctccagttcttccattctggcaatttcagcttttcgttcttctattttgacagcggcagccttcagctcttggcttgtttcaagcagctcctgttcgaattgatcgtaggcggctttcgtttcctcgaaatcctggtcaaacgaatctcttgatttgccctgccaagcatctcccaatgcagataaccgggattcaagcaacattttggagcttctgacctcttctgcggccgcactgtacttgtttgccagctcaatgactttatatgagtccaacttttgtcccctgccttttctaaattcacgcacaattggatgttttatataaatgattataaataattcggcatgtatccgaatcgtacaaaagaaccttttcataagaattggaagggcgtatattcacttaaaattcacagttggtgagactttaagattacaaaaaaggtaaaaaaaacaaatccctcagacataaggcaaatgagaaatttcccgctctatgggaaaaaacactaaagttgatcaaatgacctaagtgcgccaaacgtgttacgggacgggctatctcatggtataaatggaattgtaaacgttatcaaggaggtcgtcatatgaagaaaaaatcattctcaatcgtaatagcgggcggagggagcactttcactccagggatcgtactcatgctcttggaccatttggaggagtttccgatcagaaagctgaagctgtatgataatgataaggagagacaggatcgaattgcaggcgcctgtgacgtttttatcagagaaaaagcgccggatattgaatttgcagcgacgactgacccggaagaagcttttacagatgtcgattttgttatggcgcacatcagagtagggaaatacgcgatgcgtgcgcttgatgagcaaattccgttaaagtacggagttgtcggccaggagacgtgcgggccgggcgggatcgcatacggtatgcgttcgatcggcggtgtgcttgaaatattagattacatggaaaaatactcgcctgatgcgtggatgctcaattattccaatccggcggcaattgtggctgaagctacgagacgccttagaccgaattctaaaattctcaatatctgtgatatgccggttgggatcgaagaccggatggcgcaaattcttggcttatcctcaagaaaagaaatgaaggtccgctattacggattaaatcacttcggctggtggacatcaattcaggatcaagagggcaacgatttaatgccgaagctgaaggagcatgtatctcaatacggctatattccgaaaacagaggctgaagcggtggaggcgagctggaatgacacattcgccaaagcgcgtgacgtgcaggccgcagatcctgatacactgccgaatacgtatttgcaatattatttgttcccggatgatatggtgaaaaaatcaaatccgaatcatacgcgggcaaatgaagtgatggaagggcgcgaagcttttattttcagccaatgtgacatgattacacgtgagcagtccacagaaaacagcgaaatcaaaatcgatgaccacgcatcatatatcgttgatcttgcccgggcgattgcctacaacacaggtgaaagaatgctgttgatcgttgaaaataacggcgcaattgcgaactttgacccgactgcgatggtcgaggttccatgcattgtcggctcaaatgggcctgaaccgattaccgtcggcaccattccgcaattccaaaaagggcttatggagcagcaggtatccgttgagaagctaactgttgaagcgtgggcggagaaatcgttccaaaagctgtggcaggcgctaattttgtcaaaaacagtgccgaacgcgcgtgtggcaagactcattctcgaggatttaatggaggccaacaaagacttctggcctgagcttgatcaaagcccgacccgtatatcataactgaaattcccccattttcgaatctgtaattgtatataatagaaagaaaatggggggatctgatatgcagctcgaagaactgatcaatcagcactacagcaaattgaatgacaacgattttcatattttaaaatatatattgaatcataagcacacatgctatcaccttggaatcgacgcgctggccaaagcttgcagtgtatcgcgttcctcaattttacggcttgcccaaaagctcggtttcagtggctacagtgaatttcgcgtctttttaaagtgggaagatcagccggaagaaggcgagagtatgagttttgaaaagctgcttgatgatattgaagcaaatttgaagttcttacggacaaaggacatgacggacatgtgccagctgattgatgaagctgaccgcattttcgtctacggttctggaaatgcgcaaaagatatgcgcccgcgacctgcaaagaatgtttattccgcgccatcgctatcttattttaattgaagacacaaatgaatttaatttgatgcgcgatgattttaaagtaaacgatctgtttatcatcatttctctttccggagaaacaccggagctgattcctcaggcaagaatgctttctgcaaagggtattccctttatttccattacgaatttaaaaaacaatgtcctcgcccagctgactccgcataatctttatgcgacaagcaaacctgtgacattaagcgataaaacggaaattgtcgcttttgcaccgttttttctcgttggcgaagcattgttccgcgcatatgttgattacaaagaggcagaaaaaaatgacaatgagtagcagggggttctggtatgatgcaaaaaattcagcgctttggaagcgcgatgtttgtgcctgttttattattcgcgttcgccggcattatcgtcggtatcagcacgctctttaaaaataaaaccctcatgggcccgctcgccgatcccgacggtttttggtatcagtgctggtatattattgagcagggcggctggactgtttttaaccaaatgccgctcttattcgccatcggcatcccggttgctttggcgaagaaagctcaggcacgcgcttgtttggaagcgcttactgtttacctgacattcaactattttgtcagcgcaatattgacggtatggggaggagcatttggcgtcgacatgaatcaagaggtcggcggaacgagcggattaacgatgattgcgggcataaaaacgctcgataccaacattattggagccatctttatttcttcgattgtcgtctttttgcataaccgctattttgataaaaaactgcccgattttctcggcatctttcaaggctcaacatatatcgtgatgatttccttctttattatgattccgattgccttggctgtgtcttatatttggccgatggttcaatcgggaatcggctcgcttcaaagctttctggttgcttctggggcggtgggcgtttggatatacacgtttttagaacggattttaattccgaccggccttcatcactttatttacacgccgtttatttatggcccggctgtagcggaaggcgggatcgtcacgtattgggcacagcatctcggcgaatattcgcaaagcgccaaaccgctgaaggagctctttccgcaaggcggattcgcgcttcacggcaactcgaaaatcttcggtattccgggtatcgccctggctttttatgtgacagccaaaaaggaaaagaaaaaactcgtcgcagggctgctgattcctgtcacactgacagcgattgtcgccggtattacagagccgattgagtttacgttcttattcatttcacctttcttatttgcggttcacgccgtgcttgccgccacaatgtcgacagttatgtatatggccggcgtcgtcggaaatatgggaggcggactgattgaggcggtaaccttgaactggattccgctctttggcagccacggtatgacatatgtgtatcaaattttgatcgggctctcgtttacagcaatttattttttcgtcttcagatttttaatcctcaaattcaatatcgctacaccaggacgggaaaaggatgaacagcaggaaacaaagctatattcgaaaaaggaatacagagaacgaaaaaacaaggatgaaacggcctccgctgctgaaacggctgatgacaccgcttttctgtatattgaagcgctgggcggaaaagacaacatcactgaagtcacaaactgcgccacccgcctcagagtcagtgtcaaggacgaaacaaaggttgaacccgacagcgtattccgcgcgcttggcgcacacggcgttgtcaggaacgggaaggcgtttcaggtaattatcggattaagcgtaccgcagatgcgggagcgtgtggaaaaaatattgaatcaataaagactgccctccttttcgggagggttttcgtttgccgtcaaaaagaccgccatagtaaagtaaagaaagagacaatcgagtaaaaaggggtttggaggcttttacatgcaaaaggctttgtcgtttttaaaaccatattcattgctggcgggaattgcgctgattcttatgttgacggagcttgcagttgaactgctgcagcctttattgattgcgaaaatcatcgacgatgggatattgaagcaagatctgcggcatgtttggatatggggcgcggtcatgatcgggctgaccgtgttatcctttgcggcggggatgctgaattccttttatgccgcccatgtcagccaaagcttttcctatgatacgagaaaagggctttttcaaaaaatccagtccttctcctattccacatttggacagttttcgtcctcttcttatattacaagactgacaaacgacgtcacacaggttcaaaatatgatttttatgagtttgcggtttatgctgcgggcacccttaatgattgcaggcggcattgtgctgtcgcttgccgttaatgtgaaactcggcttttttctgcttgtgaccattccgatcctgatcttgtttttgctatgggtattaaggaaaggcggggcactgttccgctcagtgcagaaaaggctggatcaagtgaacaccatcatgcaggaaaatttaattgcaatcaagctgatcaaagcgctgcttcgcggcagccacgaagtcaaacgatttatcaaagccaacacaaggctgatggaaaaaacggtttcggcctttcagcttgtggaattcacgatgcctgtactgatgcttttgatgaatctctgcatccttttgattttgtgggcggggtcctacagtattacgagcggaagcactcaggttggcgatgttgttgcgataattaactacgcaacacgaattacaggcgcgctttcgatgtttccgtttttgattatgattttcacccgggcgaaggcttcaggggatagaatcggtgaggtgcttgaaacagaaggcgacgagcgggaggaaggcaccatatctgatcgtttgtcaggacggattgagtttcagcatgtatcctttcgctatcctgaaatggacagagaagcgctcaggaatgtctcattttccgcaaagccaagagaaacgatcgcgattctcggtgcgacgggctcgggcaagtccacgctttttcagctcattccgcggctttatcagccggattcaggccgcatttacatagatgaaaagccggttcaagatattccggctgaagggctgcgcaggcaaattggatatgtaccgcaggaagtcctcttgttttccggcacaatcaaagaaaacatcgcttggggcaaagaaaatgcttcactagatgaaataatggatgcggccaaacatgcgcaaattcatgaaacgattttgaagctcccaaatggatatgacacagttttggggcaaagaggcgtcaacctgtccggcggccagaaacagcgaatttccattgcgcgggcgctgattcgaaaaccggctatccttctattagatgacagcacaagcgcacttgatctgcaaacggaggcgaagctgcttgaagcaatcagcacataccattgcacaactttgatcattacacaaaaaataaccacggcgatgaaagctgatcagattttgctgctagaggacggcgaactgattgaaaaaggcactcacagtgagctgctttctgaatctcagttatacaagcgcatttacgagtcacaattcggaagggaggggagcgagtcatgctaaaagacatccgcaagcctttccaatatcccaaactgccaattgacaaaaaagaaggcgcgaaaaagcgggccaaagcaaaggatacaaagggcacactgagacgaatctggtcttacttggctgaaagaaaaggactgctcatacttgtcatgctaatggttgtcatcagcgccatattcggactccttggtccctttgtgatcggaaaggccatcgaccattttatcgtcgggaaaacggtcagcggcttgattcctgttttgcttcttctgcttgctatctatatcattcagtccctgtcgctttggtttcaaaactattggatgattacgatctcgcagggcacggttttcagaatgagaagcgaattgttcacccatctgcatgagctgccgattccattttttgataaacagcggcacggcgagctgatgagccgggtgacgaatgacatcgaaaatgtcagttctaccttaaatacgtcagtcattcaaattttgtcaagcgtgatcacctttgtcgggaccattgcagtgatgctgtacatgagcccgctccttacattgattacgctgaccattattccggtgatggcagcgagcctgaaatggatcaccaaccgaacgggaaagctgtttaaagaacagcagaaaaaccttggtgatctgaatgggtatattgaggaatctgtttcaggcgcaaaggtcatcaaagcatattcacgtgagaagcagattactgctgaatttctcgaaaaaaacgctgcactcaagacgtcgggcttttgggcgcagacgatttccgggtttatcccgaaggtcatgaactctttgaataacttaagctttacaatgatagcggcaatcggcggtttgtttgcgctgaaaggctggatctcgatcggctccatcgtcgtctttgccgagtattcaagacaatttacacgccctttaaacgatctggccaaccagtttaatacgatgctgtccgcaatcgccggcgctgaacgggtgtttgacgtgcttgatgaaaaagaagagcgcgaggatgaaaagaacgccgtgcatcagcccatccaaacaggcagcattgaattccgggatgtgtccttcggttacgataaagggcagcagacactgaagcatttacagtttaccgtgcctgccgggcagtccatcgcgtttgtcgggcctacgggggcgggaaagacaaccgtcactaaccttctcgcccgtttttacgagcctgacaaaggaaaaattttaatcgacggtacagatattaaaacccttactagagcaagcctgagaaaaaacatggggtttgttcttcaggattctttcttatttcagggaacgatcagagaaaacattcgctacggcaggcttgatgcttctgatcaggaagtcgaagccgctgcaaaaacagcgaatgcccatagttttattgaaaggctgccaaaagggtatgacaccgtgctgacgcaaaacggttcgggcatcagtcaaggacagaagcagttgatttctatagcgagggcggtgcttgctgatccggttcttctcattttggatgaagcgacaagcaacattgataccgttacagaagtcaacattcaagaagcgctcgcccgtttaatggaaggaagaacaagcgtcatcattgcccacaggctgaacaccattcaaagagcggaccagattgtggtgctaaaagacggtgaaatgattgaaaaaggcagccatgacgagctgattcggcaaaaaggattttacagtgacttatatgaaagccaatttgagaaatagacctttgtcctgcacagaggtcttttttgttacagttttatagtacttttatttcattttcgtaaaatgtaacaaaattacttgacgtaaacaagttatgtatatatactagcttacattaagtaagtgataacatttatcaaggaggataaaatgaataaatcatttgaaattggcacattacttttaagagttattacaggtattatcttttttgttcacggtttatcaaagtttcagggaatggagggcaccatccaatttttcggcagcataggccttccaagctttatggcgtatgtcatcgcagcgattgaactcattggcggagtgcttgtcttcttcggattggctacacgtattgtcggtgtactgttcgctcttacactgatcggcgccatcatcactgttaagctgaaagcgccattcatgggcaatgcagaatttgattaccttctgcttttgacatccattcacctggcgcttactggaagtcgattcctggcgctggacccatttgtgtttaaaggaaaaaagaacgaaaacgtttcagcataagaaaagaggcatgcagcatgaccagcattcatgaggatacacacattggctatgccaaactcacaattcgcagtctggagcgttcgcttcagttctactgtaacgtcatcggttttcaagtcttaaaaaagacggatcgccaagcggaattaacggctgacgggaaacgcgtactgcttattcttgaagaaaatccgagcgctgtcgtcttgcctgaacggtctgtgacaggcctttatcactttgcgattcttcttccggacaggaaagaacttgggatcgcgctcgcccgcctgattgaacacggcattgctatcggacatggagaccatgctgtcagcgaagcactctacctgtctgatcctgacggaaacggcattgaaatgtacgctgaccgcccccgcagcacgtggcagcgtgatcgggaaggaaactatgtcatgacgacaaccgctgttgacattgagggccttctggaagaggcaggagatgagcggaaaacatcgcttccgaacgatacaatcatcggacacattcatctgcatgtcagtgatttgaaagaagcaaaggcgttttatacagatgtactgggctttgacattgtcggaaactatgcgggcatgtccgccctcttcgtttcagccggggggtaccaccatcatatcggcttaaacatttgggcgggaagaaatgcgccgcctaaaccgacaaatgccagcggactagattattatactgttgtcctgccccaccaagaggagctggatttggtggcaaaccgagtcaaacacgccgggtattcgattgaagagacggaaaacagctttcgtgtgaaagaccctgtttccggcgcctatattacatttgtgatttaactgcaatccccttgccgaaaaaacggcagggggattttttattttccagaaactcctgtcaaaaatgccctgaggcaggtatgataagaagggaattgggtatcgggagtgatgagcgtgaaagctcttttttttacgagaatgttcaccttgatggtgagctgtttaatgtatctgtccattgtgaaagaggataactggtttggatatgtatttatagcagcaggtgctgccatgtatgcagccaatcatgttttgctgacaaaagagacaaatgccatctggttctgcctgattgatattgcaatcggcttttctttcggatttatctttcccggcacaggtttgttcattattatgctttgtccggttgcggtcgccttttttctgcggaggtttcctaaaagaacagcatggtctgtcttatgtctttcctctattttatttttgaccgtcctcatccgtacatatgcgatgttcggcaatgaatttgtcattgatcatttgactagcatgacattcgttgtcttctgcggtgtcgtgggcaaattaatccgcaagctgttggatgcgcaggatacggcaaaacagcagtttcaggaactgacggagtcccatctggcgctgtctgctgcacatcaggagctccatttatatgcgaagcaggttgaagagctgactgccatttacgagcggaacagaatggcgcgggaaatccatgatacagtggggcataaaatgacggcccttctcgtccagctgcagcttttgcgtgaatggcaaaaaagagacagccaaaaagcggatgagacagtaggtgtctgtgaaacacttgcccgtgaagcgcttgatgatgtccgcttatcagtacgcaccctgcaaactgaaaacgatccttcgctaatcgaatcgctgaaacagctgacagaggacttttgcaaaaatgcaggagtcacaacagaatttgcggtcagcggtgatcctgcaatcatcccgctgtctctccatccgaccctgatcagaacggcgcaggaagcactgaccaatgccaaacggcacggcggcgccgcagcttgttcgatacagcttgcctgcacaacggacagcatcagccttgtcattaaggatgacggcaaaggcaatcccgaggcagcacttggttttggtctcttgaatatgaaaaagcgggcagcggaacatggcggaatgatccgctttgaaagcgaacaggatcaaggatttactgtgaatgcagaattttcacttgccaataaaaaatggagcttcaggcccgtgcagcaaaaggagagtttattatgattaagatcatcattaccgacgatcaggatatcgtcagagaagggctggcatccctgctccagctcagagaagagctcgatgtgatcgcaacagcgcgaaacggacaggaagccttcgaaaaggcgaaagagctggagccggatatcgtattaatggacatccgcatgccggtttccaacggggtggagggaacaaaattaatcacaagctcattgcccggcgtaaaggttttgatgctgacaacctttaaggattcagcgctgattgctgaagcgcttgaagaaggagcaagcgggtacctgctgaaggatatgtcggcagatacgattgtaaaagcggtgatgactgttcattctggcggaatggtgcttccgccggaattgactgcccaaatgctgaatgaatggaagcgtgaaaaacagctgaaaggaataaaagagatagaaaaacctaacgagctgctcgacctgaccgagcgcgaaatcgaagttctggctgagctggggtacgggctcaataacaaagaaattgccgaaaagctttacattacagaaggcacagtcaaaaaccacgtttcaaatattatcagcaagctggctgtcagggacagaacccaagccgccatttactcggtcagatatggtatatctgtcttttgacatatgacgttttgcatatatgcttctctgaaaaggccttttacaggcctttttttcatgccctatgttctatctgccgctacatgccgcacgcctttctttcttctacaatggcaatggatcaaaaaaaggagtgagacgacgtgctgcaagcagaaaacatcaaaaaggcatatggaaaaaaaacaatcgtgaaaggtatttctttttccctccaaaagggggagtcgttcggtctgctcgggccaaacggtgcggggaagtccacaaccatttcgatgatttccggccttgtgccgcatgacagcgggaacatcacggtgggcggctatgtcatcggaaaagaaacggccaaagcgaaacaaaaaatcggcattgttccgcaggaaattgcattatatccgacgctgacggctcatgagaatcttatgttttgggggaaaatgtacggacttacgcacggcgaggccaaaaaaagatcggctgaggtccttgaatatgtcggtctgactgagcgggctaaagataagattgaaacgttctccggggggatgaaacgaagaatcaacatcggtgcggctttaatgcataagcccgagctgctgattatggatgaaccgactgtcggtattgaccctcaatcgagaaatcacattttagaaacggtcaaacagctcaacgaaacgggcatgacggtgatctatacgagtcattacatggaagaggttgagtttttatgcgatcggatcggaattattgatcagggggaaatgattgcgattggcacaaaaactgatttgtgcagccgccttggaggcgataccatcattcagctcacagtcagcgggatcgatgaagcgtttcttttggcgatccgttccctggctcatgtgaatgatgtaacagtccaggagtcagagctcaaaatcgacatttctgcggctcatcatgagaaagtcgtcaccagtctgcttgctgaagccgctgctcatcatataaacctgctgtctcttcaggtgcaggaaccgaatctggagcgcctgtttttgaatctgaccggccgcacgttgcgggattaggaggggcggcaatgaaaaaaagcatatggatcgcatggaaagatgtcaaaatcagaatcacggacagaaaagggtttatgatgcttatcctaatgccgctgatcctaacgtgtattttaggggcggcgctcggatcagttgttgacggaggcaaccggattgatgacatcaaagtcggctacattcaatcagaccagtcagatgcagcgaacatgtttacaaaagatgttctcaaaaaaatgaagtcgataaaggccacaaaagccggcagcgaagacaagatgaagaagctgattgatgaaaagaaaatcgatgtaggcatcgtcatcccgaaccattgggaagccggcaaaacctcagctgttgtttatgccgcacctgatcaaacattgaaaagttccatcatcgaaacagctgccagctcttttatagagcaatataaagcggtaaaggaagccgcgtcagcctcaatggactacatcagcaaaacggaagctgtacagcaaggaaaacttgaccctgcacagtttgcagaaaagctggcaaagacgctagaaaaagaaacaggtgacaagctgactattgcagaaaaatctgtcggcagcaaggccgttaccagctttcaatactattcggcggcaatgctttgcatgtttatgctgtttcatatgacagtcggggcgaaatcgtttttacaggaaaaggatacggagacgcttgccagaatgctgatgacgcctgcgcaaaaatccgtcattctcttcggaaaatggcttgggacgtatctgtttgctatcatacaatttttcatatttctgatcgtcacaatcaatgtatttggtgtggactggggcggtaatctgctgtttgtgagtgtactcgggctttcttacgccgcagctgtatctggtatttcaatgctgcttgcgtcgtgcatcagcgatatgaaatctgcagactcgataggcggcttcggcattcaattgcttgcggttctcggcgggtccatgctgccgctgtaccaatttccggacgtcttgcagtctgtatccaaagcggtgccaaatcgctgggcgcttgacggctttctttctttaatggaagggggaggctgggctgaccttcaaaagcctgtgcttctttttgcggcgatcggcttttgttcacttgtaattggtatcagacggcttcatacaagataaggaggtacaaaaggtgaaaaaaattctagccatttgcggcattgagctttctctcatttttaagaagccacagaactatttgatcatgtttgctgccccgcttttgcttacctttgtatttgggagtatgctcggcggcaatgatgataaggtgcggcttgcaatcgttgatcaggacgatacgattctctcacagcattatattcggcagctgaaggcacacgatgatatgtatacattcgaaaacgtgtctgaaaacaaagcgtcagaaaagctgaaacaaaagaaaattgccgggatcatcgttatttcccgctcgttccagacacagctggaaaaaggcaaaaaccctgaactgattttccgtcacggccctgaactgtcggaagcgtcgatggtcaaacaatatgcagaaagcacattggcaacgctcaatattcaggtgaccgcggcaaaaacggcatctcagacagcgggagagaactggaaggcggcgtataaaaccgttttcgccaaaaaacatgaagatacagttccggctgtaaaacggcagacgctcagtgataaaaaagagggcgcggaagcaagtgacacagcctccagagcagcaggtttttccatcctgtttgtcatgctgaccatgatgggagcggctggaaccattttagaagcaagaaaaaacggcgtctggtccagattgcttacagcctctgtcagccgagtggaaatcggtgctgggtatgtgctgtccttctttgtcattggctggattcaatttggcatattgcttctttccacccattggctgtttgccatcaactgggggaatccggctgcagttattgtattagtgtcactttttctattgaccgttgtcggcattggattgatgattgcggccaacgtcagaacgccagaacagcagcttgcgttcggcaacttgtttgtcatcgcaacatgtatggtgagcgggatgtattggccgatcgacattgaaccgaaatttatgcaatccatcgctgaatttcttccgcaaaagtgggcgatgagcgggctgacggagattatcgctaacggtgcccgcgtcacagatattctcggaatctgcggcattttgcttgcatttgctgcgatcactttcgcagcggggctgaaagcgctccgagcctaaaaaacatctgccgtttaggcagatgttttttagcatgtgggtacattcgtatgggtgtagcctgaactgcggttaatccttatctatcatagctaaaattgattccagccaagaaacgtaatttttctcccgctccagcgctttcgttagcacaagatagtggccgaagtccggtgaagaaaatgacatcggctctgctgaagccataagcttttcatagcttccctgtaagtcagaaagcttggcctgtcgtttttgcagctggtctttgaacaaatcagaagcctcctggcgcgatagacaagaaatgaaataagccttcagcataaattcatccttcaccgtctcgggtatcggctggtggcggatcagccagtcatgcagttcctgctttccgctgtctgtcagggtgtacatctttttctccagctttgtgccctgaatcgttgtccgaaacgtgataaatccttcatccgtcagctttttgagctcagggtaaatctggctgtgcttggcgctccaaaactggccgagctcctctttaaaataactcgtaatatcgtatccactcaattcgccttttcgcaaaagccctaatatggcgtattttaatactctcatgctatcctccgtgtctggctgtttcgcaaaacagatgagccggtgctcaactgtgattctaactgcctattccccttattatagaaaagggaggaagggaacacaaccgggctctttggaaatgaagataaaaggtttgtcagaaggtatccgatttatctccgtcaatataaaagagatttaaatttaattttcagaaaaaatagtaaccatattgattttttatgtataataggaaattggtggtatgaacatgttaagggggaataaacgtgaaaaaagtacttatggcattcattatttgtttatcgctgattctatctgttttagccgctccgccgtctggcgcaaaagctgaatcagtacataatcctgtcgttcttgttcatggaataagtggtgcatcatacaactttttcgctattaaaaactacttaatttctcaaggctggcaaagcaacaaactatacgcaattgatttttatgataaaacaggaaataacctaaataacggcccgcagcttgcttcatatgttgaccgtgttttaaaagagacgggggcaaaaaaagtagatattgtggctcatagtatgggaggcgccaatacgctgtactatattaaatatttaggcgggggcaataagattcaaaatgtcgtaacgcttggaggggctaatggtttagtatcatcaaccgcgctgccgggtacagatcctgatcaaaagatcctctatacatctatttacagtctcaatgatcaaattgtcatcaatagcttgtctcggttacaaggagcgcgaaacatccagctttatggcatcggtcatattggcttgctctctaatagccaagtgaacggctatatcaaagaagggctgaatggcggaggcctcaatacaaattaatatcttcaaaaaacaacctgctgtctccgttacagtgggttttttcgtctgagaaagccatagggtcttatgaccttagtctatcatgcatacgtcaatttatgacatcaggcactttttcaaatagagcggacatgttaaggtacaaccatcgatttctatcaatttgaaataaaaggagcgctgttatgcaaattaaagaaatttttatgatccgctgcatttcgtgcttaagtgtcgtcttgctccatatcatttcaatggtcctgatgcttcaggcagaagctcttgcagatatttctcacactgttgattctttccgcacactcctgatgttcagcacgcccgcttttattttcatctctgaatttttactggcccgttcttatcctgatggggtgcctgacggttttttaaagaagcggggaaaagtgatttttgttccttttttatttatcgcggccatcgatgcgctgctgatgaccagtgcgatggggggagaggtaacctttctcgcgtttgtgcaaaaatatctggcgaacgttttcttaggaaactttatcggatacttcattctcgtcatctttcaattttacatgctgcatatgatgtttcatgagtacttgaaaaaagcatcgccgaaatgggtgctgtctatctcatttgtggtgacagccgcttatttaggctatttctccgcagccagcccggctcctgcttctgaagagggaggggcatttccgttcttctgggttccgttcgcaggctggcttttctacttttgtctagcctactattgcggaaaagaatacaagcgttttttagcgctgctgaaccaataccgctgggtggtgtacggcggcgcaattgcttccggggcgctggttgtcactgtttcttatgtgggtgaaatcggcatgatcagctcgaagcggcctgatatcatgctgtattcaacaagcatgattttcctgtgttttcacttgttttccaaaatgaagcatgtgccgaaaatcatgatgtttatcagcaactattccttttcgatttatctgcttcatgcctattttatgattataggctacgtgttgcttttgaatatgcccgacattcctgccgtaccggctgttctcctgttgtttgccgtgtgcacagccggcccgattatgacttcatgggcgctgaataagttcaaatatgggtatttatttgtggggaaaatttatcagccaaaacagaagaaggtaacagtcgaagtgcgtgatcacgcagggtgaaaaacaagcggcaggggggatcctgccgcttgttgtgtattaaaacatacagtatacacaatctttttcttgtaaaataaaggagaagagtgaatagaagggagaacattcatgacatcagtcaatctaagctacccaataggagaatacaaggcgagggaatccgtatcgaaggagcaaaaagataaatggattcaagtacttgaagaagtgccggcaaaattgaagcaagctgtagagggcatgacggacagccagcttgacacaccgtaccgggacggtggatggaccgttcggcaagttgttcatcatctggctgacagtcatatgaacagctatattcgttttaaattgagcttgacggaagagacaccggctattcgtccgtatgatgaaaaagcatggtcggagctaaaagactcgaaaacggcagatccgagcggctcactcgcgcttttgcaggagcttcacggaagatggacggctctgctccgcactctgacggatcagcaatttaagcgcggattttatcaccctgatacaaaggagatcattaccctggagaacgcgctcggcctgtatgtctggcactcacatcatcatatcgctcatattacggagctttccagacggatggggtggtcttaacgcttttgccggcggaaagccggaatactgatagcagcaatcaccagaagtgagatcacagcagccgctgcatataactgatcatagccgctggcgacactcgcatgaatggcgtcgcttatcgcggttttgacttcaggaacgggaatgcgttcgatttgttcttgtaaagaagaaacatcagaactgtcgatctccggaatcatctgcatcgccttttctgaatatccgctgtccgataagcggctgttgatctcatcacctatttggtcaaacccggctgtgataaaacctgcataaagagtaggcgccaaggtcagtccaatttgccttactaatgaaagcgtgccaagagctgtacccttatttgtttttgccgcttctgatacaaggacgttcagcggagcgcctaacagaaagccaaaaccgatcccagctgccacacttgcgatcataaactcccatttttccgtcacccagaacggaaataaagcaaaccccgcacatgagatgattcccgaaagaataacggtttttacaggacctttttggtcggtaagcgctccgccaagccaagcgccgattccggaagccaacgcaagcggtgtcatccaatagcctgcttttgcggcagggacacccaaatactgttcgacatatgacgggataaaaatgactgccgccaagagccccccggataacaaaccgatgataagcgtgcgctgaaacatatggtttcgcagcagagaatacgccaaaatgggatcgcctcctcgcatttcaactctcttttcatacgagataagcgctgcaaaacagagtatgccaaaaataatacatccataaacctccggattccccaagctgtgtaagagatttgccccgtcaagattggtcatgccgtacatcacagctaaaatcgacagggacaaaaggaagattccggccgcatcgaggcgcttagcctcaggtgcttttgtttccgcgataaaacatgcgccgaaaacaaccaatagcacggcaatcggcaaattaatcaaaaacagccaatgccaagacccggtccaatcaagcagaaagcttccgatatttggcccgagcacagcggccatcccgttcattgcgccaagcagcccaagcgccttcccttgtttttcctttgggagggtcgcgagaatgtgagagctgccgatgatgaaaatcccgccgcctccaagcgcctgaatcagccgcgatatcagaaagagcgggaagctttggctcaaagcaacaagcaaagaaccaagtccgaacaggcaaacctcaatgagaaagagtttttttctgccgtagcggtcggaaagctttccgacgattggcacactgacgctaagaccgagcgtataaagggtaatgccccatgatccccaggaaggggaaacggaaaacgactcgtttatcgttgttaaggcagctgaaataattccgttatctagcgcagccataaatacaccaatcgtaaacaggctgatcgcccacttttggcctttctgctctgttaatgcttcagacatattcatcaacctcctttttattcactcaaagtatattattcattttaaatgaactaaatgtcaaataaaaaaagcctgctcccgcagtttgcggatgacagacttacagatttattcttttttcgctttctctaatgctcttgaaaggatagacagcccttcggaaaccgcctgcttttcttcaggggacagcagctctaatgaacgcttcaatttcaggtggcctttttcatacaaaccccggaaaatatttttcgcattttctgtcaactgaacaactacagagcggcggtcctcttcagaatgtgagcgtttgacaaaccctgatttctcaaggcggtcaagcagcccagttgtattggacagggaagcccccattttttcagcaatgtcgctcactttcaatgttccatggttgtttaatagcatcagcactttcatttgcggcatgctcatatccagcttcatccactcggacacatcaccgaggccggcggaagttaagactttcatatagagcacccatatttcccgttcctccgatgaaagaatgttttcgtttaatactgttgtatcgtgtaaattatattccatttcatcacttcctcatcattcactcctcttaccatattactcgattttcactcctgaaagaaagtgagcagaaaccgcatgcgggactttgtccgaaaaataacggtagtgtataatgagttggagattattgggggagaggatcgaactagaatatgattggagagaccattgctgattaaaaagaatgctttatcaatattaaaaatcgtttttcctattgctgttttgctatttgttatttatcaatcgaaaaaagaactgacaaatctgtcattcaaacgtacgctcatggtcatcaacggactggaacgaactgacttatttatgcttgtgttgatcggcttgctggctgttgcggccatgtcgctgtatgattacgtcctgaaatactcacttcgcctatcgatcacaaacggaaaagtattcagggtttcctggatcgccaattcatttaataatgtgctgggcttcggcggtttagccggcgtcgggttaagaatgatgttatataaggagcatacgaaagaccataaggcactcgtgaaaggaatcgcctggctcacatcatctatgctgctcggattatctgttttcagcattttcgtcgctgcgagaatgctgccagtggatgaagtgattcatgaaaagccttggctatgggcggtcgttatcggttttgcgctgatattgccgctgtctttggcggtgtccaaaataaaagaccgcaaagctggggacgaagagaatgcggacaaagtgaaaaatccgattttcgcatatattggagcttcagttgttgaatggctcatggccgggatcgtcatctattttgctttgttcgctatgggcattcatgcagatatcaggtatgtgttcggggtgttcgtcattgcggcgatcggaggaatgatcagcctcgtgccgggcggcttcggctcgtttgaccttttatttttgctgggaatggagcagcttggctatcatcaagaggccatcgttacttctattgtgttgtacaggctcgcctactcatttatcccatttatcttgggactgttctttgccgcaggcgacctgacggaaaatacaatgaagcggctcgaaacgaacccgcgcattgcaccggcaattgagacgacaaacgttctgcttgttgttcagcgtgcggtattagtgagaattttgcaaggctcgctttcccttattgtgttcgtagcaggtctgattgtcctggcctcagtttccttgccgattgaccggctgacggttataccgcacattccgcgcccggcgcttttgctgttcaacggcctgtccttaagctcagcgctcattctgctgattctgccgatcgagctttataaacggacaaaacgttcctatacgatggccattacagcgcttgtcggcggctttgtgttcagctttttaaaagggcttaacatcagcgcgatattcgtattgccgatgattatcgtattgcttgtgctattgaaaaaacaatttgtccgcgaacaggcatcctatacactgggacaattaatattcgctgtggcgctgtttactgtggcgctctttaactacaatctgatcgcgggctttatttgggaccggatgaagaaggtgctgcgtcacgaatatttcgtccacagcacctcgcatattacacatgcaaccatcatggcgatcattattgtgccgctgttcttcttgatatttacagtggtctatcataagagaacgaaaccgatcggagagaaagctgatcctgagcgtcttgctgcgtttctcaatgaaaaaggcggcaacgcgctgagccatctcggttttcttggagataagcggttttatttttccagcgatgggaatgcactgcttctgtttgggaaaatcgccagaaggctggtcgtgctcggcgatccgtctggccaaagagaatcattcccgctcgtgctggaagaatttctgaacgaagcgcatcagaagggattcagtgttttgttctatcaaattgaacgagaggacatggcgctgtatcacgattttggctacaacttctttaaattgggcgaggaagcatatgtagatttaaatacatttaccttgactgggaagaaaaaagccggccttcgggcaatcaataaccgctttgagcgggaggagtatactttccatgtggatcatcccccattttctgatgcgtttttggaggagctgaagcaaatctcagacgaatggctcggctcgaaaaaagagaagggattctcgctcggattttttgatccttcctatttacagaaagcgccgatcgcctatatgaaaaatgcagaaggagagatcgttgcattcgcaaatgtcatgccgatgtaccaggaaggagagatatcggttgatctgatgcgctatcgcggcgacgctccaaatggcattatggacgcattgttcatccgcatgtttttatgggcaaaggaagagggctgcacgtcttttaatatgggaatggcacccttggccaatgttggcactgcctttacatccttctggtccgaaaggtttgccgctgtcatttttaataatgtcagatacatgtacagcttcagcggcctaagagcctttaaagaaaaatacaaaccggagtggcgagggaaatacttggcgtatcggaaaaacagatctctttctgtcaccatgttcctcgttacacgtctgattggcaaaagcaaaaaagactccgtctaataagacggagtcttttttttatttcgtttttaagaagtaggtttcaatatcatcaagcagatagtttgcggctttaattccgcctgcggttgtccacacgacgtcatcgacttcatgtgcattacctgacttcacggcctttaggtttttccatagtgaactgcttgtccactgattggcccatttttcattttcctttgcattatcggctttataagtgaaataaaacagcacatcagcatccatatcaggaatagattctttactgtcggttgagaacgtaaattggtccttttgtttcttaaacagctccacttgtttttcagggcgtttgaagccaagctggtctaaaataatcccaggaaatgaatcggtataatagattcttgactcaccggataaaaagcgtacgacagaaacggttttgtttgtctggtcgcccagcttgttttttaaatcagaaacgcgtttatcaaaatcggcaatgacttccttgcttttgtccgccttattcaccgcgttggcgtatagagtcaggttatccttccagttcccggccaaagattcagcaaaaacagtcggcgcaatcgcatttaactgatcataaattttctcctggcgcactttgtttccaataatcaaatcaggctttaattctgcgatggcttccacattcggttccgtttcaagaccgacgtttttaacacctttcatgtcatctttcagatagtcataccacgggtcgcccttccatgactttacggctccgaccggcttaatgccaagcgctaagagcgcctctgttccttcattagttaaaacaacaatccgttttggattggcggggatgttgtctgatgtccccattgcatgtttgaccgttcttgttttgctgcttgacccctcgctgttgcttgaactttctgaactattacaggcagaaagtaccataaaggccattaaaaatacgaatagcatgctgatatgctttttcatctttttcctcccaatattgaaattcattatcatttagatcataataagcagtgttaagagtgtcaatccctaattgaggattattctcaaaaacaaacattacatagtaaataactaggagaatattagatcatgatctgcaaaaaggcatcttcaaaatggattgtgttagtatgtctgattttcattttactggcggctgtctgcgcaagcgtcgtgtatggctatacaggtacgtcatggagacaggtctatcaggcgtttacttccttcaacggaacaaatgagcatgtcatcatcaaggatgtcaggcttccgcgcgctttggttgcgacagtcgtcggcgcctcgcttgcagccgcgggcgctctcatgcaggcgctcacaaaaaatccgcttgcgtcaccggggattttcgggattaacgccggtgcaggtttttttattgttgccggatcgttttttctgcatattcagtcacctcaggcgctagtatggagctcgtttcttggggcagcatttaccgctgcgatcgtctatgcagcaggctcgcttggaagagaaggactgacgccaatcaaactgacgctggcgggagctgccatggcagccatgttttcttctctgacacaaggcttgctttctgtcaacgaactcgagcttgcccaggtgcttttttggctgactggctctgtgcagggccggagtctggatctgttgatgacgatgtttccatatgcagcggcagcgctggtaatctgcttctttctcggccaaaaaattaacctcctcgttatgggagaagatgtggcaaaaggactcggccaaaaaacgggcctgctgaaatttgtgatggcgctttgtgttgtcatgcttgcagggtccgctgtcgccattgccgggccgatttcttttatcggcatcattattccgcattttgcccgctttgtcgttggtaatgattatcgctgggttctgccattttccgctgttttgggtgccattttgcttgtttgcgcggatatcggtgcgcgatatatcattatgcctcaggaagttcctgtcggggtcatgaccgccatcatcggaatgcctgtgtttgtgtacatcgcaagaagggggcgaagctatgaaacttcgttttggcgttactgcggctgaaaagaaagcatggatcgtctttttgattttactgggttaacagctgcggtactcatcataagcgctggtctcggacaaaggtttattcctccctgggatgtagcaaaaacattctttggtgcaggttccaagctggatgaactgatgatcatgtcgttccgcatgccaagaattttgacggctttatgcgccggtgtctgcttggcagcggcaggcgcgatattgcaggggctcgtcagaaaccctctcgcatctccggatattatcggaataacaggaggagcggcggtagcggtcgtgcttttaatgatgttcttctcagaccgcagcagttcacttacgatcagtctgtcatggcttccagcagccgcatttatcggcgcatcggctgtcgggctcatcgtctatttactggcatacaaaaatggcgcctccacatttcggctggtgcttatcggaatcggattttcaatgtcggcgcaggcgatgactaccctgttgatgatcaaaggcccgatttaccgagcatcacaagccaatgtgtatatcactgggtcagtttatgggtcaaactggcagcatgtaaaaatagctattatcttatctgtcattctcttattcatttgttttgtcgcgctaaaaaatatgaatatacaggtgctgggtgaagatattgcggcgggtgcaggaagcgctgtgcagcgaaatcgttttttcttgctacttttgagtacggctcttactggttgtgcagtttcagttgccggcacaatcggttttgtcgggctgatggcgccccatattgcaagacggcttgtcggctcatcttatggcgcgctgctcccagcgtcggcacttattggagctctgctcgttttaacagctgatatcgtcggcagaaccttatttgctccggtggaagtgccggccggcgtctttacagcggctatcggcgcaccttattttatttatttgctctataaaacaagaaattcttaatcgttacacccattttcttaaaaaagaaaatgggtttttttgataatgactgaagattcgtaattatttttgctatactgacagagacattgataaagaaagggcggcagatgaatgaaagaagcagaggtattaaaatatgaagcatttacaagcagtcccggcaaaggaaaccccgcaggcgtcgttttgcagggagacgattatacggaagacgagatgcagatcatagctgagcgtgccgggtattcagaaacctcctttatccgaaaaagcgagtcggccgatcttgaactccgttactttacacctggacacgaaatgaatttgtgcggtcatgcgacagttgcttctctttacgcattatgtgagaaaagaatgctggagagcggtaaaacgtacagcatccaaacgaaagcgggtatcctgcctgtgaagatttctgaaaaagatggccgtattcatatcacgcttgaacaggcctctccgcaattcaaaccatttacaggcgatcggggaaaacttgcgaccgcactgggtatcaccgatgaagattttcatgaagaccttccgattgtgtttggcagcactggcatatggacagccatcgttccgcttaaatcattggaggcttccaaaaaaatggtgccagataacaaacaatttccggaagtgttaattgatctgccaaaagcttcagtccatccgtttacctttgaaaccgttcatcccgacagcgacctgcacggacgccacttttcatccccgtattcgggaacgattgaagaccccgtgaccggcacagcatccggcgtgatgggggcttatatgaaacattatggaaatgccgagcagcataaatttatcattgaacaagggcaggaaattggaaaagacggaaaagtggagatcgaaatgaacgaagccggcggccatgtgaaagtgaacatgacaggaacagccgtttactcagaaacccgtattcttaaattctaatacggatgatggtttacaaaaagatgcactttccgttattattatgaaatgataatcattttcaattgcataggaaggtgagacggtatgcctcaaaccgaacaaatacatcagcattcagtactgcgggacatcatacgcagcagaagatcgattcgaaagtttaaacaagagccagtaccttcagcagtcattcttgacatgcttgaaacggcaaaatatgcgccaaatcacagagtgacagagccatggagatttatttacgtttccagtgagacaggtaaagcgaacctcatcaatacatttgcagcgttctctaagaaatccaagccggatatgacagaggaaaagcttcaaaatttcaaaaacacacttgggcgcgttccgggatttctgctcgtcgtgtttcaggaagatgaaaacgaaagagcgcgggacgacgattttgcggcaacaagctcgttgattcaaaatctccagcttcttgcttgggaaaaaggaatcggcatggtttggaaaagcggaaaaatcctttatgacaaagaagtccatcaggcctttggtttgcaggataatgagcgtttcgccgccatcatacaaacaggttatcctgacgaggcgccggaagtgaaaaaacgcacaccgatccgcgaccggtttactgaaatgtaaaaagccccttgtctcaaacggagacaagggtttttcattaacgagatttctttttcgctctgttgtcggctgctttcgcacgctcttgcgcttcgcgatcatctgcatcagcaagctcggttgaatattcttcgtaaacgccgtcagtttccctttttaatgtatcgggaacttgtggaagcttttgtttgtttttatcacggtttttgtggatatgatttctgcccatatcaaattccccctaaaaagtgatatcaaacaaatatagtatttggttttaaggggttatgtattcctacttccgcttagcagctttttccgcttttttaaattcgcctgaataaagaacttcctgcatttttttcaggttggcgccttgctggtgcttctccctctttttttccataaaaaggacctccttcaaccatgttattcttaaggttgacgcttcctgctgtttttatacagtctttcggtccgctatcagctgtgagagtgcaaattcaagatccgaatatgtaaaacgaaatccagaggttatcgcttttttaggaagagcgcgctgtcctttcacaatcaaaagactcatttcacccaatgcttttgataaaaagaattccgggacggggagccaatgcgggcggtgcttcacccgtgcaatcgcttttccgaattgcttcatgtccacaggattgggcgcggtgacattcattgggcctgagatgccggcattttccaccgcatatcggatcatctgggccgcatcctcgacatgaatccatgacagccactgccttcccgttccaatcgttccgccggccagaaacttataggggagaaccataagcggtagagcacctttttctccaagcatcacgccaaatcttgcataaaccgtccggatgcccatcgcttcaatatgctgtccttccttttcccacaggtgtgcagtatggctgagaaaatcctcatctgacgttgcagaatcctctgtgaaagttttctcaaggcttgtcccgtaaatacccacggcactggcttggatcaatgtcttcggcttctccttctgtttctgaataagccgctgcacttcacgcgtcgcattgatacggctggagagaatgtgctgcttcgttttttctgtccagcggccaaaaatcgattttcccgcaaggtttatccagacatcaatatgaggaagttcctgctccggggcggctccttccgtcagccattggacatatgtcatatttttttgttcagtttcccttgcgtttcttgataaaatataaacatggtgtccctggcggataagaacgcctgtcagatgctggccgagaaaaccggttccgcccgtcattgcgatattcatgaacatctctcctcatcgttctaataaatatactttacctcattgtaataaaagaaaacgcgtttcaggcctgagaagggagattaagatgccgtttattacaaaaatatcaacgcaaaaaaagaatacggaacgcttcaatatttttctggatgataaatacgccttcagcgtggacgcggatgtgctcgtgaaatttgagctcaagaagggaaaagaactcgatgatcttgacatcattgagattcaatacggcgatgaagtgaagaaaggcttcaaccgtgcgcttgactttttatcctatcgaatgcggtcgacgaaagaggtcgaggaccacttaaagaaaaaagaaacctcgccccccgtcattgcggaagtcatccataggcttaacgattacaagtacttaaacgaccaggaatttgcctcagcctatgtcagcactcacaaaaaaacaaacggaaaaggccctgatgttttgttcagagagctaagagcgaagggaattgatgccgatacaattaaggaggcgctaagttccttttcctttgaagatcagacaagagaagcggtcaagcatgttgaaaagcttctcaaaaaagataaaaagctttcgacgaaagaattcaaacagcgcgcccagctgcagcttcagcgcaagggcttctcatttgatgttatcagcgcggcgatggatcagattgaatatgaaaatgatgaagacacagagaaagaagcgctgcgccttcacgcggaaaaagcgtttagaaaataccgctatgacggctcatatgaaagcgccatgaaggtcaaacaatttttattccgcaaaggattctcactcgatttaatcgagcaattactgcaggaagaggagtactgaaatggagaaacgatacagtcaaatgacacctcacgaactcaataccgaaatcgcattactttctgaaaaagcaagaaaagccgaacagcatggaatcataaacgaactggcagtgctcgaacggaaaattacgatggcaaaagcatatttgctgaacccggaagattactcaccgggagaaacatatcgtgtggaaaacactgaggacgagtttaccatcagttatttaaatggcgttttcgcatggggatacagaacctcttcccctcagcaagaggaagcgctgccaatctcagtattgcaagaaaaagaataaagcgtaacaggaggctgattatcagcctctttttgtttgcagcacatttacacgaattcttaaagaaaaaatcattgaattcacttgaaaaatcttttaagatgaaactcgttgttttttaaaatcaaaggaggcgatgacgttgagtatcaaaaacccatctgtaaaatttattatatttgttcttatgatttgtacattttcaatcggctatacagaatacgcggtgatgggtattttgacgtcgattgccaatgactttcatatacaggtttcatccgcagggcttcttgtcacggcttatgcggctagcgtttgtttgacaggaccgctcgtcaccatcatttccgtcaagcttccgagaaagcctgtgcttcttgggctgatggcggtttttatcctttccaacctgatgagcgcactggcgccgaattttgcggtattggccatttcaagaattttatctgcgtccattcacggcgctttcttcgcgattgccatggtattcgcaagtgaaatggttccgccggaaaagcgtgctgcagctgctgcttcaatgaacggcggactgacagtggctctaatgcttggtgttccattcggctcttatctcggagatgtcctgaattggagagcggtgttttccatcattacggctcttggtgtcatcggatttttaggccttatggctgccgtgccgaacagaaaaccaaaagtgatcccaatgcttatgaatgagtggggggtttttaaacacaaacaagtgctgttttccttcgcgattaccattttaggctattccggtgtctttatcgcctacacctttatcgaacccattttgaggcattcagccggattcagcacggttggcattacaggtgctctctttgcgtatggattgggaggcgttgccgggaatttctttgctggaaaggtaccgctgcctttgctgactcggacgatgatcggcgtaatgatcggtttaatcggtgttctggctgtatttccttacatcgccatttacccggctgcagccattgtggcaacgttcctattcggggcatgcgcattcggcacgccgcctcttctgcaaacaaaggtcatttcctcatctgagggcggcacaaccattgccgcagctgtcagcgtatcagcatttaaccttgccaatgcccttggtgcatggatcggcggaatgattttaaacggaacaggctcttattcctggctgtttgcaggaggtgcgcttatgaccgcatgcggacttgtgctttctaccttcgcacacttatcagaaaagaagagcgtctacgaatatcaagtcaataaagggtaaaaaacagctgcagtgtatgcagctgttcttctttaccgtttgcctgaggctctcattctttcttgaggatgctgattgatagatccgtcagcacgctttgaagcatagtcgtcctttgctctcggttcaccctgaaatttgttttcgttttcgtaaggaaatcctttttctttatttcggaccatgtcatatccccctaggttcgagatcaaaaagttgcgtcttttcagatgaagacgtaaggttagtatatggagaacaccacgtaataaagcgttatttttttcctgaagaaaggagactgcacacatgaatatgtacattgagaaactgactaatctgcttctggaaaagaacgagatgatcagctatatacaggcaaaaacgtgggtggaattgttatggagcgatttcgaagcaacctacgcaaaagccggacacgcctatcaaggtgaaaaaatgactgaaaaaatcgtcacacaatggattgaaaactatggcggccagctccacctttttcaaagctcccgtaacgacgtgaatgattacttaaatcaaagcagaggccttttgcattaaaaacctgccgttaacgaccggcaggttttttcattttcttaaaattaccttaacaggaagaaatcataaacaaaacatgtttcaccagcctgtcaatcagggaataccacttatatcttgtcaaaatgcgaggaggagctttatatgaaaaagaaacaagtaatgctcgctttaacagctgccgcaggactgggtttgacagcacttcattccgctcccgcagcaaaagctgcgccccttcacgacatatctgtcagcatgccatcatccgatacttacatcataaaagcaggaaaactgaatgtccggactgagccaaatcatgaaggtgatattctcggcactgtatcatcagaacaaaaggtaaaagtcgataggttcgtaaatgccgattgggctcaaattcatttcaaaggaaagaaagcatatatttcaactcactttttaatgaaaaccgcaagccaagcgaaaacaacgaaacagacagccttctatgcaccgacgcccgaaaatggaaaagctaaacagctctcatctggaacagaggtgacaatacttgggtggggattcagtgaaaacggcggatttgacttcacttgggggttcgtggattatggcggagttaaaggctatattcacacaaaggatttacaaatgcgataaaaaggcaggccgaggcttgtctttttgcctatgcatgaaacatttcttctttctgcacgtaacaatgagaaaggagatgatgatatgacgggtttagtcggcggagggcttatgatcattgcgggcatactgatcaaactgtttcctcccaaatcgatcaacagtgtgtacggatacagaacgagacgctcaatgtcagatcaaagattatggaatgaagcgaaccgttacagtgcatcattaatgatcctgtcaggcttggtgattgcgggaatgggtttgctgctgggatcaaacttgtttattcttcagcttatcctgctgattgccgccagtgtcataacatttatgctaacggagaaaaggctgaaaatcatgacgcacagtcaaggaggagatagaagtggacggagttaaatgccagtttgtcaatacgaacggaatcacgctccacgttgcagccgcaggaccggaagacggcccgttaattgtcctgctccatggatttcctgagttttggtacggctggaaaaatcaaatcaaaccgcttgttgatgcgggttaccgggtcattgctcctgatcagcggggctacaatctcagtgacaaaccggaaggaattgattcgtatcggattgatacattaagagatgatatcatcgggcttattacgcaattcactgatgaaaaagcaattgtcatcgggcatgactggggaggggctgttgcatggcatttggcttccacacgcccggaatatcttgaaaaactgatcgcgatcaatattccgcacccgcacgtcatgaaaaccgtaacgccgctttatccgccgcaatggctgaaaagctcgtatatcgcatacttccagctccccgatataccggaggcatcactaaaggaaaatgattatgaaacattagacaaagcgattggattatccgaccgtcccgcgctttttacatccgaggatgtcagcaggtacaaagaagcgtggaaacagccgggcgcactgacagctatgctgaactggtacagagccctcagaaaaggaagcttggcagagaaaccctcttacgaaacagtaccttaccgaatgatctggggaatggaagaccgctttttgagcaggaagcttgcgaaagagacggaaaggcattgcccgaatggacatctcatctttgttgatgaagcttcccattggattaaccacgaaaagccagccatcgtcaatcagctgattttggaatatcttaagaaccaataagctaaaatttctctccatccgtctgtcataatggcagactttttctgtgcgtttttttcatagtctgttttaaacatgacaaaataacattaaaaatcatgaatgtcaccataaaattgtaacaaaaaacaggtttaaacgactttaaaaaaaggaatagccttactgaagatttgtgtaaaactcccctaaggcaatacttaaaaagaataataaaaagaaggtgccttaatgaagcaaggattaatctcgattattatcccgtcttacaatgaagggtataatgtcaaactcattcatgaatctttaaaaaaggaatttaaaaacatttattatgactatgaaatattcttcataaacgacggaagtgttgatgacacgcttcagcagatcaaagacttggcagcgacgtgcagccgggtaaaatatatatctttttctcgaaactttggaaaagaagccgcaattttggcgggctttgagcatgttcagggcgaggcggttattgtaatggatgccgatctgcagcatccgacatatttgctgaaggaatttatcaaaggctacgaagaagggtatgaccaagtcattgcccaaaggaacagaaaaggggacagctttgtccgctcactcttatcatctatgtattacaagttcattaataaagcggtggaagtcgatttgcgtgacggtgtcggtgacttcagattgttaagccgccaagctgtgaatgcacttttgaagctgagcgaaggaaaccgcttttcaaaaggccttttttgctggattggctttgatcagaaaattgtattttatgaaaatgtcgaacgaaaaaacggcacctccaaatggtcgttcagcagtctgtttaactacggaatggacggcgtcgtttcatttaatcataagccgctgagattatgtttttatacaggcattttcatcctgctgctttccatcatttatatcattgccacattcgttaaaattctgactaacggtatttctgtgcctgggtatttcaccattatctcagcagtgttatttctcggcggagtacagctgttaagccttggaattataggtgaatatatcggccgaatctattatgaaacaaaaaaacgcccgcattatttgatcaaagaggcgaatatcccgaacaaagacctgcctgaaacgaacgaattaaaaagcatgcggcgtctgacaaaaatgcactgaaaataccaagcgccattggcagtgctttttttgcgtgtctattatcttaaaagcaagactggagaatttatatgaaaagaaaacatatcatgatctatgcggccagtttgctggtgtccgttctggcacacgctttttttgtgaaagaatgggcggaaggcaggtatatgacaggtccgggtgacgggcttgcgcaaatgatcgtatttaaaaaattattatttgaccaatatacacacgggaattttttctacaattattcattcggacttggcggcggcacattcagtcagctcggctattatttttccgcgtcttttctttttcttgctgtgtccgccgctgtttggctgcttcaagccgtccagctgatcggagaagcggatacgcttttttgggcagagtcagctgttttcatcagtatttttaaattgagcttgatcatctttacgtccgcttctgtttttcattatcttcttaagcacagggcggcatcgttcacgggagccgtgttatacggcgtctcaattatttatttccgtcacgaagcgtattgggaatttttcaccgatacaatggtttggcttccgctgcttgtgcttggtgcagaaaaaattattagagagcggcgtccggcgtggtttatcgttgcgtgttcgctgacgttaatcaacaatttttactttgcatacataaaccttatattcatcggaatctatgtgctgttcagatggctgatccgtttggaaccacatgaagagaaaagatggattcaaatcagattatttctcgtttcaggcttcatttcttttggcatcagtgcggcggcgtttgtgccggtagtatacggttttttaaacaacctgcgccctccatacagccagaaaatagagtggctcaatttcgatgataatatcttattttcgagccggatcatcattgtgccggccgcttttctgctgtttttgtttattatttctttttacaaaaaccgtgtgtttcgtctctttgccgggttgagcctgctgtttattctgtttcatttcagtccgtatgcggcaagcgtctttaacggtttttccgccccgcaaaaccggtttgaatatgttctggcctttaccattgcgggagcagctgcggctggtttgtcacagctgtctgaattgaaacggaaagaactgctcccggccgcagctgtcgtcctgcttctttacttgtatcatattcaaaggtataagctcgatatatggaagcctgcgaatgaaagtattctattgctcttactcatgacaatcgcagccttgtttgctgcagcttttgcgaaaaaacgggcaaaaatggctgtgtacggtataatcattctttcttcgctgtttgtcgccaactcctatcaaaaatacgcgctctcagaaggcggcgatttggatagtgtgacaaaagaatatcttacaagtgaggaatacagagggcgggaatcatctgagctcatcagacgtttacagaaggaagacgatgatccgctcatgagaatcgactggatgaacggggtccgcaataatacgccaatcatttacggatttaatggcttcagcgcgtattccagcattttaaacaaagatctgctggccttctattggaatgatttaagcatcgatatgggcagggaaagcgtcagccgttacgcgtcattgggagacagggcgaatttatacagcctgctttacggcaaatattatatgaccgaaaaaacaaacgaagccagcgtcccgtacggattcaaaaagcatttagaaacagagcattatgcagtttatgagaatcagtacatgcttccattcgtcaaaacagcggatgccatatacagcgaaagtgagctggaccgattgcccgctcttgcgaaagaacaggcgatgctgaaaggaattatattaaaagatccatcaggaaaaacggagcagacaccaaaaccgtccaatttgatcaccaagtcggacatcaccgcaaaacaagcccagtatcaaaacgggctgctaaccgtaactggagaaaacggaggagagctgatcatcaccccgaaacagccatcatccgctgcgggagactactatgtcagcttttatttgaaaagcaaagcaaaagacaaaggatttacgttaaaggtaaatgattatgtcacaacaaggaaatcgaacaaatcgatctataaaaccggagtaaataatataacggtaagagtgcctaaatcaggccatatctcaatcaatcttccgaaaggaacctatgagctgagaaacatagcgctctatgaagaaaattaccaaacgctgaaaaacgctgtaatgcaaaataaaacagagaaagcagacaaactgaattggaacaaaaatcgactgacctttgcctatcatctgtcaaaagaccagtacatcatgcttccgatcccatatgaaaaaggctgggagctgaagatcaacggaaaaacacagaagatcgaaaaagcggattatgcttttataggcttcaaggcgcaaaagggagacaatcacattgagctgacttactatccgccatacttcaaaatatcggcggtcatatctctcgtcagtctgctgtttgctgttttctatataagacgtaaaaagcccggctctatatagagccgagctttaattttttctgaagtttttcttcgctgaatatccatcccgtataggacgaacgaatcgtgagatcatggccgatgtgaacaattgcgacaaacggataatggcctttgctccgataacgcaggtcgataaatctcacctcataatgatctttaaacgtatccacttcccaccggtataccggagaaaaggacagaaacgccgcaatgttatcatcctgctttgccgcatgcattacatcggtttcaggaacaggcacccgattaaatgtatccagaatcacgacatgtccttccatgcttcttcctacatagaaagcatgtgctgtcgtcactgcgattcgccattgcctgaatttcatcgttggagaaataataatgctttcgatctcatcatgaatcatctcatgaagcttccgtttaattctcagctgcatgatcaggcgcaccaagtagtagcctaccaatatgatatataagctgagaaacgtgatgccgggactcccgcctgcataccaaatcgcgatagctgctagatggctgataaaaataaacggatcaaacgtattaatcagcccgagcgcaacccattttttcgaaaatggacgaatggcttgtgttccataggcgttgaatatatcaacaaagacatgcagaacgactgccagcagtgtccacagccacaggtgcagaaaatcggcctgaggataaaataaatacagaatcgccgggatgatgacagaccaaaacaaaacggcgggaattgaatgggtaaatcctctgtgattccttatataaacagcattgtttttaagctttaacacagtatcaatatccggagcctgagagcccgcaagcgttgcgatcataacagcgtgagccattgccggatctgatccgacaacaggatcaagcgtcgcaataccgcccagtgcgatgcccataacgacatgtgtgcccgtatccataggtgacctccttgcaggatgatcctgcacattcactttgtaagaaattccccattttcatatacccaatttttaaactgattcaatcgttctcatatgtttccgctttttctttattactatttaatgtaacatattatcgtactgtgcccttagtgtacaacaaaaaacagtctaaagaaaagcggggcgcgaaagactggggagaaacacatatgaacgtacttgaagacaaattaaaacaaaaagacatacagcaatttcgcgatgatttaatctcatggtttgaacgagagcagcgcgttctgccgtggagagaggaccaagatccatataaggtgtgggtatctgaagtgatgctgcagcaaacgagagtagagacagtgattccttactttctccggtttgtggaacaattcccgacagtggaagcgctcgctgatgctgatgaagaaaaggtgctgaaagcatgggaagggctcggctattattcgcgagtcagaaacctgcaaagcgcggtaaaagaagtgaaacaggaatacggcggcattgtccctccagacgagaaagattttggcgggttaaaaggcgtcggcccttatacaaagggagcggtgctcagcattgcctacaataaacccattcccgcggttgatggaaatgtgatgcgtgtcatgtccagaattctttctatttgggatgatattgccaaaccaaaaacaagaacgatctttgaagacgccatacgagcttttatttccaaagaaaaaccatctgaatttaatcagggcttgatggagcttggagccttgatctgtacgccaaaatcaccctcatgcctgctatgcccggttcagcagcattgctcagcatttgaagaaggcactgaacgggagcttccggtaaaaagcaaaaagaaaaagcccgggatcaaaaccatggccgcgatcgtactgactgatgaagacggacaagtgtatatccacaaacggccgtctaaaggtttgctcgccaacctgtgggaattcccgaatcttgaaacacaaaaagggatcaaaactgagcgtgaacagctcattgctttcttagaaaacgaatatggcatacaagctgatatcagtgatctgcaaggtgtagtcgagcatgttttcacccacctggtatggaatatttcagtgtttttcggtaaagtaaaacaagtgtcggataccagcgagctgaaaaaagtatcgaaagaagagctcgaacaatttgctttcccggtgtcacatcaaaaaatctggaagatggcagtagaagcagccgccatctcggctgctccgtaaaccattcttaatcgtaagagacgcgcgtgccgtggctgtagtccgcttcattgcgcttcattccgccgcgcgcttcaatttcttgcgttaattcccggtattttgattggccttcttcgttcaaataaggcataatttgctgaaaggcatgatgaaaataagcgagttcactgttcttccaatcttttttggaaaccatgttcaattcgctcatatcacgtccgacatacataacagaagaccccctttaaagttcttgccattattgtttgtggaaataaaagaactatacgctacaaggagatgaggaaaaatggaacaaaataaatgtgcactcgtaacaggaagcagccgcggtgtcggaaaagcggccgcgatcagacttgctgagaacggctataacatcgtcattaactatgcacgcagcaaaaaagcagcattagaaacagcggaagaaatcgaaaagcttggcgttaaagtgcttgtcgtaaaagcaaacgtaggacagcctgcaaaaatcaaagaaatgtttcagcaaattgatgaaacgttcggcagacttgatgtttttgtcaataatgccgcttcaggagtactaagacctgtcatggaattagaagaaacacactgggactggacgatgaacattaatgcgaaagcattgcttttctgcgctcaggaagctgccaagctaatggagaagaacggtggcgggcatattgtcagcattagttcattaggctctatccgctatcttgaaaactacaccacggtcggtgtatcaaaagcagcgttagaggctttaacccgttatcttgccgttgagctttcaccaaaacaaattatcgtcaatgctgtttcaggcggagcgatcgacacagatgcgctgaagcacttcccgaatagagaagatctgcttgaggatgcgcgccaaaacacgccggcgggacgcatggtcgaaattaaagacatggttgatactgtggagtttctagtgtcttccaaggctgacatgatccgcggacagacaattatcgttgacggcggacgctcactgctcgtttaaaaatttttaaaaaagaggaatagctatacgatcacctgcacattctaatgaccgtggaggtgataacaatggctaactcaaataacttcagcaaaacaaacgctcaacaagttagaaaacaaaaccaacaatcagctgctggtcaaggtcaatttggcactgaatttgctagcgaaacaaacgctcagcaagtcagaaaacaaaaccagcaatcagctggacaacaaggtcaattcggcactgaattcgctagtgaaactgacgcacagcaggtaagacagcaaaaccaatctgctgaacaaaacaaacaacaaaacagctaatcactgaaacagaaaaaagcacttcatcttcgggtggaagtgcttttttctgtttgaaaaacgacaaaacttgtggaaggtctacagaatgagtcaaagggtttgctttatggagatcgaaatgattaaaggaggaaatgtttatactttcatcaggctgaaggaggaaccgatgaccgaatttgaaaagctggtaagtgaacagatgaaaacgatggataagcttctcgatctccaatcagagctcgaccgctgcaaacaaattgaggcggaactccggcatttggaaagggatgcaaggctgcgtgggattcaggctgaaattgcggtaaaacggaaacaccttgccgatatacaggatatgtttcaaaagcagacagagcaggtcattcgttcatatcgcagctcagaaaagccgtcttcctttgtgtagtgcaggaatgtgccattccccggccggaatggctcttttattttcatttttcaatttgtaacgttataataggtaaaagacgttgtcggtaagcaaatttggacatactaactgtagggctttatagaaagtaggggagaaatatgggctatcccaaggaaggagaaaccattcaaattcacagctataagcacaacgggctgattcatagaatttggaatgagacaacaatcttaaaaagtacagaaatgtgtgtcatcggagccaatgaccggacgatggtaaccgaatcagacggccggacatggataaccagagagcccgcaatctgttattttcacgcaagacaatggtttaatgtcatcgggatgctgagggaagacggggttcattattattgcaacatcagttctccgtttgcctatgatggcgaagcaattaaatatattgattatgacttagatgttaaggtttttcctgacatgacctacaatattctcgatgaagacgaatatgatgatcatcggaaagccatgaattatccaaaagaaatcgacagtattttaagagactacttaaatacgctgctccattggattcaccagcgtcagggaccgtttgcgcccgagtttgtcgatatgtggtatgaacggtatttgcgctatacaaaataatggttacgtaaaaacctgttgcggggtacaacaggtttttcacatgggctcacacacatcatgataaagagagagggggaatcaacgtgggggttatgaaacgctacatgcaattcgtcaaaccttataagaagcaaattttcgttacagtattaatcgggatcgtaaaattctccattccgcttgctctcccattgcttctgaagtacgtagttgacgacattattcaaggaggcggcacggccagtgacaaaaccacgtcattgttcacgattatggcgatcatgttcgccttatttttaattttgcgcccgcctgttgaatattaccggcaatattttgcccagtggactgccagcaaggtgctttatgatataagagctaagctgtttgaccatatacaaaaactgagccttcgtttttacgcgaatacaagaacaggggaagtcatttcccgagtgattaatgatgtagaacaaacaaaggatttcgtcatcacagggctgatgaatatatggctcgatatgctgacgattttgattgtaatctctatcatgctcacactggacgttaaattaacgctgatttctatcgtattattcccattatacggaatatcagtgaagtatttttacggccgtttacgaaagctgacaagggagcgctcacaggctcttgctcaagtgcaggggcatttgcacgaacgcattcaaggcatgcctgtcatcagaagctttgcgatagaagatcatgaacaggctcaatttaatgagaaaaacggtcatttcttagataaagccatccgccacacgaattggaacgccaaaacctttgcggtcgttaataccattacagatttggcgccgctcatcgtcatagcgtgcgccgggtattttgtcattaatggaccgctgacagtcggaacaatggtcgcgtttgtcggatatattgacagaatgtacaaccctgttagaaggctgatcaattcctctacaactttgacacagtcaatcgcatcaatggacagggtgtttgaatttattgacgagccctatgaactcactgacaaaccaaatgcgataaaggccgatcagattcgcggaggagtggagtttcaaaacgtttcgtttcaatatgagaaggacaaagaaaatattcttcatgatgtatccttaaaagtaaatagaggagaaactgtagctctcgtcggcatgagcggaggaggaaaatcaacgctcgtcagcctgatcccaagattttatgatgtaacaagcggcagactgctgattgatgggacggatattcgcgattatgaagcaagaagccttcgcaaccaggttggtatggtgcttcaggatacctttttatttagtgaaacgattcgggaaaatatcgcgatcggcaagcctgatgccacacttgaagagataatcgaagccgccaaagctgcaaatgcccatgaatttatcatgagttttccagaaggatatgagacccgggtgggagaacgaggcgttaagctttcaggcggacaaaagcagcggatctcaattgcgcgggtattcctgaaaaatccgccgctcctcattttagatgaagctacatcagctctggatttggaaagtgagcattacattcaagaagcgatggacaaactggcgaaggatagaacaacttttgttgtcgcccaccgtttatcgacaatcacccatgcggataagattgttgtcatggaaaacggcacaatcattgaaatcggaacccatgatgaactcatggactatgagagccagtacaagcatttatttaccattcaaaatttgaactaaaacatcaatcttatatccttttaacgaaggatataagatttttttgtgtataaaaaaacccggctgtttaaccgggttactcttctgtttctatttcgcagtctttcggatgatacgtttgaaaacttgtgataagtgtttctaaatgttcaagctgctcgcgatattccacggcgcttgccataatattgagcatgttgtaatcaataagctcctcatccgtattctgctgattttttaaaaatgactttgttaaaagctgcttataccggatgccttcttcaaccgcgtcatcatgcggcttgatttttccgacaaacctcatcaaaatccgttcgtgccagtaaagcaggtaatcaagttcttcagtcaatgtttcctgaaactcttccggcatatgatagatctcgttttccagacgatgcagcttcttcaatgtatcaagcgcccgatttgcagtaataatggcctgtctgaacaggacaagctttcttgatttcacataagtcgttttcttaaagtaacttctttcttctttatatagaagatatgtctgatcaagcttgatcattttttctttcagtttttcaatatcctctttcaaaatcgaatgctctgtcgactgccgcatggacaatctgatccacttcataatttcttcggtgttttcgacggtattatgaatcagctttgtttcgtacttaggaggcaaaaacacaaggttgacgataaaggaagaaagcacccctaagatgactgtgcttgttctgatcagcgcgaacattaaaaagtcgtcaccggcagattctaatatcgcaatgactgttacaagagcaattgaaattgtatgttcaattttaagtttcagcatgattgtaatgacaataactgctgttaacccgatcataatcgggctgggtccgaaaataaggccgaacactgtggcaatcacagctccgatgatatttgcttgaacctggtcaataataatgagaaaagagcggtaaatcgacggctggatcgcaaatatcgctgcaattccagcgaaaatcggcgcgggaagcccgatccacgaagccaaataaagggcaagtgtaatcgcaatcccggttttgaaaatgcgggcaccaagtttcattggtttgtgcgtgcattcctttctatagtaaattgtgtgacatagcaaatgggctaatccttaaaattcccggttagtttatttgctaaacaattaagtaatatacagggatcgatacaaatattcaagctatttttctagaaaaagaccaaaatcttacacgttgtttgattccataaaaaaaacaggagctcaaagctcctgttcaaggtatctgattctagtttttaagatgtttaaaagcatcctcgaccgctgcaagcgtgtctttaatatcctgctctgtatgtgctgtggtaataaaccaagcttcatacttagaaggtgctaaattaattccgcgttccagcatcagcttgaaaaacgtagcgaatgtttctccgtcactccgttcagcctgctcgtaattttcgactttctcatcagagaagtataccgtgagcgcaccttttaaccggttgaccgtaatggtgatgccgtgtgtttctgcgtgcttcaaaataccttcctcaagcatagcgccaaggtgatcaagcttttcatacacgcctttttctttgagcacttccagacaagcgatgcctgataggatggaagcggggttccctgccattgttcctgcctgataagcaggtcctagcggagctacctgctccatgatttcttgtttgccgccataggcgccaatcggaagtccgccgccgataattttcccgagtgctgttaaatctggtttcacctgtaagagatcctgcgcgccgccatacataaagcggaaagccgtaatgacttcatcgtaaataacgagagcgcctgcattatgtgtcaattcatttactttttctaagaagccctctttcggctccacgataccgaagttgccgacaatcggttcaacgagaaccgccgcgatttcactgccccatttatcaagagccgctttatagctatcgatatcattaaatggtactgtgatcacttcgtttgcaatgcttttcggtacaccggctgagtctggtgtgccaagagtagacgggccggagcctgcggcgacaagcacaaggtccgaatgcccgtgataacagcccgcaaatttaatgatttttgtccggcttgtatatgcgcgagccacgcggatggtcgtcataacggcttctgtacccgaattgacgaatcttactttgtccatagcgggaatggcttctttgagcatttttgcaaatgtaacctcgtgtttcgttggtgttccatacaatacaccgttctctgccgcttttttaatcgcttctgtaatatgcgggtgggcatgtcctgtaataatcggaccatacgccgctaaataatcgatgtatttgttgccgtccacatcccaaaaataagcgccgcttgctttctccattgcaacaggagaaccgccgccgactgctttatatgatctagacgggctgtttacaccgccgacaatgtgctgtaatgcctcattgtgaagttcaattgattttgtatgcaagaataaaaacctcctatatctccatgcgtcctttctattgtagcatgcttccgaacaagaacaatggcttcgggcttcagattcagctgagatggttgtaatctggacaagaattggatacgcttaataaaaaacatccggaggtaacgtaatgactatagaaatcggacataaagcgcctgatcttgagttaaaaggtgatcatggggaaacagtaaaattatcggattataaaggaaagtacatcgtgctttatttttatccaaaggacatgacaccggggtgtacaactgaagcatgcgattttcgggacagtcacgaaagcttcgctgaactggatgccgtcattatcggcgtcagcccggacagccaggaaaaacacggaaaatttaaagagaagcataaccttccatttctgcttcttgttgatgacgagcataagctggcggaagcatttgatgtgtggaagctgaagaaaaatttcggaaaagagtatatgggaatcgagcgttccacttttttaattgataaagaaggccggctcattaaagaatggagaaaagtaaaagtaaaggaccatgtagccgaagcgcttcaaaccctcaaagatatgtcggaaaagtaaatctctatgagcctatgcttacttttaccctgatatcaattgacaaattatcgtagaaagagttacactaattataaacattacaatgtaagaattttttttagaagagaggtgcatgacggatggctgcacatgaactaaaagaagccttagaaacgttgaaggaaaccggagttcgcattactcctcaacgtcatgcgattctggaatatctcgttaactctatggctcatccaacagcggacgatatatataaagctctggaagggaaatttcctaacatgagcgtagcgacggtatataacaatttgcgtgtgttccgggaatcaggtttggtaaaagagctcacatacggtgatgcttccagcagattcgattttgtcacatccgatcactatcacgcgatttgcgaaaactgcggtaaaattgtggacttccactacccgggccttgatgaagtggagcagctcgctgcccacgtcacgggcttcaaggtaagccaccaccgtttagaaatttacggcgtctgccaagagtgttcgaaaaaagaaaatcattaaaaataagctgaccgcacgaaacggtcagcttattttatttcgacattttctttttattataagactcatcaaattcttttccttctaatcccttatctaaagtcagcggctctcggcaatgcatgcacatatcgactcttcctaaaacctttgtctctttatcacagcctggacaaatgacgcgaaccgctttagtcgaaagcattccgatccaaaagtaaactaccgtgctgagaccgatggataaaagcccaagtatcataaacaaactagaaagcaaaactgactctttgaaaaagatcccgatgtacataatgataaacccaacgaaaaccaaacttaacgcaaatgttctgattttattaattttgctggagtatttcgccatgtccatccccctctgttttaactatagcacaaacccgatgggattttcttcatgttttcggttgaactggaatttacatatggagagttactgtgaaattgtttataatagttcaatgtgtttagaaaaaaggaatttcgttttaaccatagaattgaatcaaatagagaataaaaaaatttgaacaattgcattggaggaatagtgatggaaaatcttctccgtccaatttaccaagaaagagcaagtcaccccaatacattggctgtcattatgattgagagaagaaacaaaacatcttccttaacagataactttgatgcagctttgctggtgattgtaaaggatgctgatgagccagtttttataaagcattatgaatttgatcatcaaacagcttctttgcatgtggtaacagattctcagattcaagaatggattttgcttggaacaaatagaagaatcatagattggattgtaaatggcagagtcttgtttgaccgtaatgaatacgtagttgaactgattgacaggctgaatacatttccgtttgccgaacgtaaactgaagatcggactcgaatacggcaaattaatcagaaggtatgttgaagggaaagctttttttgaagccaatcaatttttagatgcctacaatgccgttgttcatgcgctgcatcatttagcacgtattgaagtaatcgacagaggattccatcccgaaaccacggtgtggagccaagtgcgccagatggagccccaagtgtacaaattatattccgagctgattgaaagtcatgagagcctggaaaaaagacttgaattattattcttagcaaatgattttctcatccattccaaagccgagatcggttcggcgcatcttttcgaagtaatgaaagaaaaagacatttggcaattcggtgagcttcttcaacatcatgacctaaagcactttacccaagatcttggcgttatgcttgattacttgacagaaaagggacttatcaacgtctgccagatagaaacgaaaggacaggctgtctatcaccgaggatattcttttaaaaaagatgttgactctgattcttgaccgtgttatattattaaacgtcgctgatgcgcttctgagaaaacaagctcacagcggcgggaaaataaatcaaaaaaacatttgacaaaagaaagtcaaaatgttatattaataaagtcgcttcaacaagaagtgaaaatgatctttgaaaactaaacaagacaaaacgtacctgttaattcagtttttaaaaatcgcacagcgatgtgcgtagtcagtcaaactagggtctgcacgacgcaggtcacacaggtgtcgccgcagaaagcggtgaacttaacctgtgatccatttatcggagagtttgatcctggctcaggacgaacgctggcggcgtgcctaatacatgcaagtcgagcggacagatgggagcttgctccctgatgttagcggcggacgggtgagtaacacgtgggtaacctgcctgtaagactgggataactccgggaaaccggggctaataccggatggttgtttgaaccgcatggttcaaacataaaaggtggcttcggctaccacttacagatggacccgcggcgcattagctagttggtgaggtaacggctcaccaaggcaacgatgcgtagccgacctgagagggtgatcggccacactgggactgagacacggcccagactcctacgggaggcagcagtagggaatcttccgcaatggacgaaagtctgacggagcaacgccgcgtgagtgatgaaggttttcggatcgtaaagctctgttgttagggaagaacaagtaccgttcgaatagggcggtaccttgacggtacctaaccagaaagccacggctaactacgtgccagcagccgcggtaatacgtaggtggcaagcgttgtccggaattattgggcgtaaagggctcgcaggcggtttcttaagtctgatgtgaaagcccccggctcaaccggggagggtcattggaaactggggaacttgagtgcagaagaggagagtggaattccacgtgtagcggtgaaatgcgtagagatgtggaggaacaccagtggcgaaggcgactctctggtctgtaactgacgctgaggagcgaaagcgtggggagcgaacaggattagataccctggtagtccacgccgtaaacgatgagtgctaagtgttagggggtttccgccccttagtgctgcagctaacgcattaagcactccgcctggggagtacggtcgcaagactgaaactcaaaggaattgacgggggcccgcacaagcggtggagcatgtggtttaattcgaagcaacgcgaagaaccttaccaggtcttgacatcctctgacaatcctagagataggacgtccccttcgggggcagagtgacaggtggtgcatggttgtcgtcagctcgtgtcgtgagatgttgggttaagtcccgcaacgagcgcaacccttgatcttagttgccagcattcagttgggcactctaaggtgactgccggtgacaaaccggaggaaggtggggatgacgtcaaatcatcatgccccttatgacctgggctacacacgtgctacaatggacagaacaaagggcagcgaaaccgcgaggttaagccaatcccacaaatctgttctcagttcggatcgcagtctgcaactcgactgcgtgaagctggaatcgctagtaatcgcggatcagcatgccgcggtgaatacgttcccgggccttgtacacaccgcccgtcacaccacgagagtttgtaacacccgaagtcggtgaggtaaccttttaggagccagccgccgaaggtgggacagatgattggggtgaagtcgtaacaaggtagccgtatcggaaggtgcggctggatcacctcctttctaaggatattatacggaatataagaccttgggtcttataaacagaacgttccctgtcttgtttagttttgaaggatcattccttcgaaatgtgttctttgaaaactagataacagtagacatcacattcaattagtaacacaagatatcacatagtgattctttttaacggttaagttagaaagggcgcacggtggatgccttggcactaggagccgatgaaggacgggacgaacaccgatatgcttcggggagctgtaagcaagctttgatccggagatttccgaatggggaaacccaccactcgtaatggagtggtatccatatctgaattcataggatatgagaaggcagacccggggaactgaaacatctaagtacccggaggaagagaaagcaaatgcgattccctgagtagcggcgagcgaaacgggattagcccaaaccaagaggcttgcctcttggggttgtaggacactctatacggagttacaaaagaacgaggtagatgaagaggtctggaaaggcccgccataggaggtaacagccctgtagtcaaaacttcgttctctcctgagtggatcctgagtacggcggaacacgtgaaattccgtcggaatccgggaggaccatctcccaaggctaaatactccctagtgaccgatagtgaaccagtaccgtgagggaaaggtgaaaagcaccccggaaggggagtgaaagagatcctgaaaccgtgtgcctacaagtagtcagagcccgttaacgggtgatggcgtgccttttgtagaatgaaccggcgagttacgatcccgtgcaaggttaagcagaagatgcggagccgcagcgaaagcgagtctgaatagggcgcatgagtacgtggtcgtagacccgaaaccaggtgatctacccatgtccagggtgaagttcaggtaacactgaatggaggcccgaacccacgcacgttgaaaagtgcggggatgaggtgtgggtaggggtgaaatgccaatcgaacctggagatagctggttctctccgaaatagctttagggctagcctcaaggtaagagtcttggaggtagagcactgattggactaggggcccctaccgggttaccgaattcagtcaaactccgaatgccaatgacttatccttgggagtcagactgcgagtgataagatccgtagtcgaaagggaaacagcccagaccgccagctaaggtcccaaagtatacgttaagtggaaaaggatgtggagttgcttagacaaccaggatgttggcttagaagcagccaccatttaaagagtgcgtaatagctcactggtcgagtgactctgcgccgaaaatgtaccggggctaaacgtatcaccgaagctgcggactgttcttcgaacagtggtaggagagcgttctaagggctgtgaagccagaccggaaggactggtggagcgcttagaagtgagaatgccggtatgagtagcgaaagaggggtgagaatcccctccaccgaatgcctaaggtttcctgaggaaggctcgtccgctcagggttagtcgggacctaagccgaggccgaaaggcgtaggcgatggacaacaggttgatattcctgtaccacctcctcaccatttgagcaatgggggacgcaggaggatagggtaagcgcggtattggatatccgcgtccaagcagttaggctgggaaataggcaaatccgtttcccataaggctgagctgtgatggcgagcgaaatatagtagcgaagttcctgattccacactgccaagaaaagcctctagcgaggtgagaggtgcccgtaccgcaaaccgacacaggtaggcgaggagagaatcctaaggtgatcgagagaactctcgttaaggaactcggcaaaatgaccccgtaacttcgggagaaggggtgctctgttagggtgcaagcccgagagagccgcagtgaataggcccaggcgactgtttagcaaaaacacaggtctctgcgaagccgtaaggcgaagtataggggctgacgcctgcccggtgctggaaggttaagaggagcgcttagcgtaagcgaaggtgcgaattgaagccccagtaaacggcggccgtaactataacggtcctaaggtagcgaaattccttgtcgggtaagttccgacccgcacgaaaggcgcaacgatctgggcactgtctcaacgagagactcggtgaaattatagtacctgtgaagatgcaggttacccgcgacaggacggaaagaccccgtggagctttactgcagcctgatattgaatgttggtacagcttgtacaggataggtaggagccttggaaaccggagcgccagcttcggtggaggcatcggtgggatactaccctggctgtattgaccttctaacccgccgcccttatcgggcggggagacagtgtcaggtgggcagtttgactggggcggtcgcctcctaaaaggtaacggaggcgcccaaaggttccctcagaatggttggaaatcattcgcagagtgtaaaggcacaagggagcttgactgcgagacctacaagtcgagcagggacgaaagtcgggcttagtgatccggtggttccgcatggaagggccatcgctcaacggataaaagctaccccggggataacaggcttatctccccaagagtccacatcgacggggaggtttggcacctcgatgtcggctcatcgcatcctggggctgtagtcggtcccaagggttgggctgttcgcccattaaagcggtacgcgagctgggttcagaacgtcgtgagacagttcggtccctatccgtcgcgggcgcaggaaatttgagaggagctgtccttagtacgagaggaccgggatggacgcaccgctggtgtaccagttgttctgccaagggcatcgctgggtagctatgtgcggacgggataagtgctgaaagcatctaagcatgaagcccccctcaagatgagatttcccattccgcaaggaagtaagatccctgaaagatgatcaggttgataggtctgaggtggaagtgtggcgacacatggagctgacagatactaatcgatcgaggacttaaccacattttgaatgatgtcacacctgttatctagttttgagagaataagtttttcaaaaaaacacttgattttctcaagaatacatagtataatgttaaatgtcactgaaattgtctggtgatgatggcgaagaggtcacacccgttcccatgccgaacacggaagttaagctcttcagcgccgatggtagtcgggggttccccctgtgagagtaggacatcgccaggcagacttcattccgcagtagctcagtggtagagctatcggctgttaaccgatcggtcgtaggttcgaatcctacctgcggagccattattggagagctgtccgagtggtcgaaggagcacgattggaaatcgtgtaggcggtcaactccgtctcaagggttcgaatcccttgctctccgccactgatacttatacataattacaattgaaagtctgggcccgttggtcaagcggttaagacaccgccctttcacggcggtaacacgggttcgaatcccgtacgggtcattatatgatggaggattagctcagctgggagagcatctgccttacaagcagagggtcggcggttcgagcccgtcatcctccaccattatatcatcgcggggtggagcagttcggtagctcgtcgggctcataacccgaaggtcgcaggttcaaatcctgcccccgcaaccaaattttaaaatggtccggtagttcagttggttagaatgcctgcctgtcacgcaggaggtcgcgggttcgagtcccgtccggaccgccatttaaatacttaggctcggtagctcagttggtagagcaacggactgaaaatccgtgtgtcggcggttcgattccgtcccgagccaccacctatgccggtgtagctcaattggtagagcaactgacttgtaatcagtaggttgggggttcaagtcctcttgccggcactgttttttcaaaatttaatgtggaggggtagcgaagtggctaaacgcggcggactgtaaatccgctccctcagggttcggcagttcgaatctgcccccctccaccatttataggggcatagtttaacggtagaacagaggtctccaaaacctccggtgtgggttcgattcctactgcccctgccaaatttatgacatcttgagattatggcggttgtggcgaagtggttaacgcaccagattgtggctctggcactcgtgggttcgattcccatcaatcgccccatattatcattgggctatagccaagcggtaaggcaacggactttgactccgtcatgcgttggttcgaatccagctagcccagtctcactttttatatcaactgcatataatgtattaagtccattaaaaatgcggaagtagttcagtggtagaacaccaccttgccaaggtgggggtcgcgggttcgaatcccgtcttccgctccaattacggcggcatagccaagtggtaaggcagaggtctgcaaaacctttatccccggttcgaatccgggtgtcgccttcttattgccggggtggtggaattggcagacacacaggacttaaaatcctgcggtaggtgactaccgtgccggttcaagtccggccctcggcaccaattttacttacatggtaagttgaattggtgtttgtgttttatcattataactaatcatattaatgatctacttatgtagatcatttttttaatgctttgatttatcataacaagttaagttccgaggcctattataaagcggctgtatagctagtctttcaacacttttattttatatttccataaaaacttttttgaaatacgttgacactttatgagattcatgatatatttatattcgtcggttagatacgacgtaaaacttgccggtgtggcggaattggcagacgcgcacgactcaaaatcgtgttccttctggagtgtcggttcgaccccgaccaccggtatactgaaaaacccgtttcttaacagaaacgggtttttattttttattaaagaaaaggagccgaggctcctttttatacttactcagcgtattggtctaggatctcttctagcacctcttctagctcttctgtatcttcaagctctgattggctgaaacggacgcgtacaagctgttctccgtcattatacatctcttccagccaccctcggagtcctcttgctctgcggtcgacttcgaaaatgatttccaaaccgtcttcgtctaaaaggaaaatgagctctaattcatcaagcatctgacgataatatccggaagtcggaacgaattcgaattcttgaacaaacggaagacgacgctggaagtatggcgcttgttcgcagtctgcttcgttaagacggaagcccaggttttcgattgcttcaagcacattttcaatccaagggtgcgcttcaacgaaaatacggtcatgatcggatttatcgataccgccttgaatgtcaaggtctgtcaccacggcaacctctactttccctacagtgatcggcgtatctagaggcagagtgaatgtgaacggaaattgatgctcttcaccaggctgtatggtaaatgaaccagtgacccggaaagaatgaattgtagcgtatttccggtgctcttcatcgtcttttacaatgacataccgtgtgctaagctgtaaatcgatataacggatgtcctgagcgatttttccgcctttgacatgtaccgttccctgtacttcttctcctggaaaatatgcgtctttttctaaaattgtatctacttttgcagctccaattccggcacttgccgcaagcttcttaaaaaatgacatgttagatcttcccctttttcttttttctcaacagatatacgtaagaaggaggaaaaaagattcgtttgattcatacttttttcctattattcgtctcggcctagggacagactaagaataatattgaaaataaaggagtggatggaagtgaataaagaaagtttggttgcagatgaattacacagaatgtttttggccggtgagctgcaaatcacagtagaggaggatataaacagtatttccgaaaggctgagaaacggtgatctcagtttagaccgattaagcggtgaagacgcgtttataaaagaaacggtaaacgaggctttaagaagagtggagcaataaaaaagagacggcatctcatctttgagatcccgtctctttttgtggtctttactgcaagataaaagcgtaattgctcacccgagccaccccttttctaacagaagatctgacagttcatcatggagataaacagttgtatctaattgatcatgcaatgctcttctgatgtggggattttcggcttctgttattgcgacagtgtatttgttaatgctggtttttattgttgttaacaaatcaagaatatctttgggacaaagactttgttcaatgggaaaccacctcctttgttttttagcagctcctgataagaaagtatttggctttgtttcttgcttctatacaaaatgctataataagcaacaaattttgttggggggtgtgatgatgaagcagattattgcgatgggaggcgggggtttttcgatggagccggataatttgtccctcgatcaatatatcctcaatcaatcaaaacgagagcagcctcgtatttgttttttgccgacggcgagcggagattcccaaaactatattcagcggttttatcatgcatttcaaacattggattgcgtgccgtctcatttatctttgtttaagccgccatcatcagatttagcttcttttgttatggaaatggacgtgatttatgttggcgggggaaatacgcggaatttacttgtgttatggaaagagtgggggctggaccatattctcagggaagcatggaagaacggtgtggttgtagctggaataagtgccggtgcgatctgctggtttgaagaaggggtgacagatcagccggaccgctgacaagtttgaaaagtttaggttttttgcaagggagcttttgtccccattatgacggggaaaaggatcggagaccggcgctgatatctaacaagttcttatgcagtggctatgcagcggatgatggggctgctctccatttcataaatgatcagctgtttcagactgtgagttcaaggtcgggtgcaaaggcatatcgggtgatgatggctgaacatgaaatagctgaaatcccgttgccggtcaaatatttagggtgaaattggctgaatattatctatattcctctttttttcagattgattttatgataagatgagtgcgaaatcaatagttactgggggtgcccgctttcgggctgagagagaaggtaagcttcttaaccctttggacctgatctggttcgtaccagcgtggggaagtagaggaattgtttttgttattgtcttgctgggcaataatatgtttctttctgactgtaaccgggttcatttatatgaatccggttttttgtgctggttatgggcttgattttgtcctttcaaacgtagagaggggaaggaaaagtaatgcaaaacaattcagtgcagcaagccaacatttccattatgtcaagtttttcaggcagcaagaaggtatacgtggagggttcttcttcggacatccaagtgccgatgagggagattgcattgagtccgacgacgggatcgttcggcgaagaggaaaacgcgcctgtgcgtgtctatgatacaagcggaccgtatacggatcctgaagtaaccattaatattcaagaaggattaaagccgctccgccaaaaatggattacacagcgcggtgacgtggaagagtatgaaggtcgggctataaaaccagaagataacggttataaaaaagcaaatccaaacgtaagctacccaggattaaagcggaaaccgctgagggcgaaggcaggtcaaaatgtcacacaaatgcactatgcaaaaaaggggatcattacacctgagatggaatttatcgccattcgtgagcatgtgtctcctgaattcgtcagagacgaggtagccagcggccgggcgattattccttcaaacattaatcaccctgaaagtgagccaatgattatcggccggaattttcatgtgaagattaatgcgaatatcgggaattcagcggttacgtcatccattgaagaagaagtggaaaaaatgacgtgggccatccgctggggagcggatacgatgatggatctctctaccggaaaagatattcatacgacgcgtgaatggattatccgcaattgccccgtgcctgtgggaactgttccgatttatcaggcgcttgaaaaagtaaacggcgtagcggaggatttaacgtgggagatttatcgtgatacgctaatcgagcaggcagaacagggagtggattattttacgattcacgcgggtgttttgcttaggtatgtaccgctgactgccaaacggacaactggtattgtgtcacgcgggggagcgattatggcgcagtggtgtctggctcatcatcaagaaagctttttatacacacattttgaagaaatatgtgagattatgaaaatgtatgatattgctttctctcttggggatggtttgcgtcccggatcaattgctgatgccaatgacgaagcgcagtttgctgaattagagacgcttggagagctgacgcaaattgcctggaagcatgatgttcaggtgatgattgagggtcctggacatgttccgatgcataaaatcaaagagaacgtcgataaacaaatggacatttgtaaagaagcgcctttttacacattggggccgttgacaacggatattgctccgggatatgaccatattacttcagcgatcggagcggcgatgatcggttggtacgggacagcaatgctttgttatgtaacgccgaaggagcatttagggctgccaaaccgtgatgatgttcgtgaaggagtcattacatataagatcgctgcgcacgctgcggaccttgcaaaagggcatcccggagcgcaaatccgggatgatgcgttatcgaaagcccgttttgaattccgctggcgggatcagtttaatttatctcttgatccggagagagcccttgaataccatgatgaaaccctgcctgctgaaggagcaaaaaccgctcacttttgttccatgtgcggtccgaaattttgcagcatgagaatttcacaggatattcgggattatgcgaagaaaaacgatctcagtgaagcagaagctataaataaaggattaaaagaaaaagcaaaagagtttgtcgatacgggaagcaatttatatcaataaaaaaaatgaagatggagaatgctccatcttcattttttttagaaaaacagagagcgtcgaagcggcggaatactctgttcaaagcggaaaacattttctggatcatatttcgttttgacacggcggagtcgttcaacgttttcgccgtaatatgttcttggccagtttctgatttcgatatctggccaatttacgtagtctcccatcgtttctctcgaaagggacgttctcagcccctcaatccagcggacattttgtcttttttcttcaggagatgtccagtttgttaagtattcctgggcgatgattgcatcacgataataaaatgccgtttggtcgggagcgatccgtccggctgccccgccgagtgcttgctgccagacactggcgttttgattcggagcgtgctctaaaaagtgttttattgttgagatcggacgttctgataatggcttttcaatgaaagagccggagcgtttcattttttgaggctgattgcctcccgggctgttaaaaaaggttaccgcttcgatgaacggcattgtttttaccattccgcttgttgggcttcctgctttcaataaagtctttaacagtttttttaactctgtttttggcccgacaaattggccgagggcttctatgcggtttacttctttaggccaaaactctattgatgatgtaagccggtcatctgtatacggggcccagtgctgccacgtgttaaatacttcctcaaaatcatcccatccccatgtaatagaaaaaatcgacacttgagagatgggcactgctttaaatgtcatggaggtgactatgccgaaattgcctcctccgcctccctgagacgcccaaaataagtctggatgatttgaacagctgactgtaatcagatcagcgccctctttttcgtctgctacgatcatctcaagctgcacgaggctgtcgcaagtaaggccggcagcccttgttaaaagtccaattcccctccgagagttaaacctgtgagccctacattggcaatggtgcctgcgggaagcgtcaggccgtattgccagagtgtccgatagacttctcccaattcagcccccgcttcaatataggccagctttttatcctgattcacagttatttttttcatttcgcttaaatcaataacaagaccgttatttaaaagggaaaagttctcatagctgtgtctgccgcctctaatacggaaaggcacacggttttcacgcgcccatttcagcgcattgagtgcatcctgtttgttttggcaaaacacaatgatgtcaggatacctttctaagcttaggttaatattggttcttgcttcgttatagtccggatcatcccgtgtcacgatacgtccggtcaattttgtcttttccacactcccacatctctttctctcgtattctagtttctctagcttatgcgtcaagggaaaagagtgtataaggaaaaagcggggatgcaatctgatacagtgtcaactcccttaaaaaatagttgacaggtcggtattgtatgaattaacatggtcagtacaaatttttcaaatttatcgcgctgatcggaacaccgaaggctcttatcgtttagataagggccttttttgtatgaaaaaggagggattattgatgggagtcaaaaaagaaaaggggagaaaacgattcagaaagcgaaaaacctacgggaatcagattttgccgcttgagctgctgattgaaaaaaacaaacgagagattataaacagcgcggagctcatggaagaaatttatatgaagattgatgagaagcatacgcaatgtgtaactaaatagaaaaaaacccgctgattacagcgggtttttgcatttctacattaagcatcttttttaatcggcaatccaaggccttctgccacgcgttttccgtattcaggatccgctttgtagaagtgctcgatttggcgcagtttgatttcttctttttctaccggcttcatagcattaacgatattttcaacaaggcgggtacgttcatcttcactcattaaacgatacagatcaccggcttgagtgtagtgatcgttgtgatcgtagcttacgctgtcagcgatgccttgtaccggatatgctgcttgcttatcctcaggtgactcttttggaccgccgaagctgttaggctcgtaatacacagatccgccgccgttatcatcaaagcgcatttgtccatcacgctgataattgtttactttgttgcgtgcgcggttgattggcagcgcttgatggtttgcaccgacacggtagcggtgtgcatcatgataagcaaacagtcggccttgaagcattttatccggtgaaacatcaataccaggcacgagtgttccaggtgaaaatgtcgcttgttctacctctgcaaagtagttttccggatttctgtctagaaccatgcgtccgacctcgattaacgggtagtctttttgagaccaaacttttgtgacatcaaacggatcgaaacggtacgtgtttgcatcttctaaaggcatgatttgcacatatagtttccatgcaggataatcaccgttttcgattgcattgaaaaggtcttctgtatggtaatcagggttttcaccggcaatttttgctgccgtattgacatcaaggtttttcacgccttgttccgttttaaaatgatatttaatccatacgccttcgccttcggcatttgtccatttgaatgtatggcttccgaagccgtgcatgtggcgaagtgttgcaggaattccgcggtcagacatcaggattgtcacttggtgaagtgactctggtgaaagtgaccagaaatcccatacagccgttgggtttttcaggtgtgtttttggatctcttttttgtgtatggatgaaatcagggaacttaatcgcatcgcggataaagaatacaggcgtattgttgccgacgatgtcgtagtttccttcttcagtataaaatttaacagcaaatccgcgcgggtcgcgaactgtgtcagcagagccaagttcaccggcaactgttgagaaacggatgaacaacggtgtgcgtttgccgacttcagaaaggaaagcggctttcgtgtattttgttacgtcgtttgtcacttcaaaatatccgtgtgcgcctgctcctttggcgtgaacaacacgttcaggaacacgttctcggttgaaatgggccaatttttcgagtaaatgtacatcttgaattaaagttggtccgcgagaaccggcagtcattgagttttgattatctccaaccggagcgccccagctagttgtcagtttatttgaactcatgttatcacctcttggaatttataagaacataatatcatctctaagtaaaaagtcaatattattttataattattataaaatagttatctctattaagcgatatctagtattgaaagtgtggaaaaaccttgttggaacagctttttatggcacttgataatttttgaagaaataatttttccttctctatttgcgaaacaagcagagtaagtgataaacaaggatatcaaaaatcgtatttaaaaaagagttgacatatcggaataatttgaattaacatgttattcaaacaaaaaacaattgggcagctgatcggaccgccgaaggctctcatctctacaagaacagagatgggggcctttttgttttttttgaaggcggggttggcagaaagagagggataaaagtggctgtgaccatcagcatcaaagaaaaggcatttgttcaagagggccgcaaaaacacggtcttagagaacatagaattatcaatcgcaccaggcgaatttctaacgcttatcggaccgagcgggtgcggaaaaagcaccctgttaaagattattgcagggcttgattctgaatatgacgggagtgttgaaattaacggccgcagcgtaacagctccgggtattcagcaaggatttatttttcaggaacaccgcctctttccttggctgactgttgagcagaatattgcagccgacttgaatttgaaggacccaaaagtcaaacaaaaggtggatgaactgatcgagattgtcagattgaaaggatcggaaaaagcatatccgcgcgagctgtcaggcggcatgtcacagagagtagccatcgcccgggcccttctgcgggagcctgaggtgctgcttttagatgaaccgtttggtgcactcgacgcttttacaagaaaacacctgcaggacgtgctgctggatatatggaggaggaaaaaaacaacgatgattctcgtgactcatgatatagatgaatctgtttatttaggaaatgagcttgcgatccttaaggccaaaccggggaaaatccataagctgatgcccattcacctggcgtatccgcgaaaccggacgactccggatttccaagcgatcagacagagagtgctgtcggaattcgagaaaacagaagatttggagtacgcagaaggatcagggatatagaaagggcggaagcggaaatgaaaaaaggactcattgtattggttgccgttatttttctgctcgcaggctgtggagcaaatggagccagcggtgaccacaaacaattgaaggaaatacgtattggtattcagcaaagcttaagcccgcttttgatcgcaaaagaaaaaggctggttcgaagatgcatttgaaaaagaaggcatcaaagtgaaatgggtggagtttcaaagcggtccgccccaatttgaaggccttgcggcagacaaacttgatttttctcaagtcggtaattcgcctgtgatcgctggacaggcggcaggcattgactttaaagaaattggcttatctcaggatgggttgaaagcgaacggcatccttgtcaaccaaaacagcggcattcaggacgttaaggacttaaagggaaagaaaattgcagtcgctaaaggcagcagcgggtttgattttttgtataaagcgcttgatcaagtggggttgtcagctaacgatgtgacaattattcagcttcagcctgatgaagcagcttccgcatttgaaaacggatctgttgatgcctggtccatttgggagccgtacttgtccttagaaacaatgaaacacggggcaaaaatccttgtgaacggagaaagcacagatttatattccccgggttttactttagtaagaacaaagttttcagaggagcatccagacgaagtggtccgttttctgaaggtgtttaataaagccgttgtatggcaaaaggaacatctggatgaagcagcggacttgtattctgacattaaagatctcgataaaaaggtcgtcgaaaatgtgctgaaaaatactgaacctctgaatgaggtcatcagtgacgacattgtgaaagcgcagcaggaaacagcagattttcaatttcgaacaaaggcgatagataagaagattgatgtgaaggatgttgtcgataacacttttatcaaaaaagcattaaaggaacattcctcaggaggtgatcaatgatgaaagcagaggctgcgggctcgctgcccaaaacgaatgcggaagcggtgcgaaaaaagcccggaaggaagagatacggctggatgaaggggcttttactgcccgctgtcatcattgccatctggcaggtcatcggcgggctgggggttgtgtccgctacagtgctgcctacacctgttacgattgttctgacctttaaggagcttattttgtccggcgaactgttcggccatctgcaaatcagcatttatcgggcggcacttggttttttgcttggcgcggggcttggattgatgatcgggattttggccggattttccaaacggacggagctgtatcttgatccgtcgttgcaaatgcttagaaccgtacctcatctggccgtcacgccgctgtttattttatggttcggatttgacgaagtatctaaaattttgctgattgcgctcggtgccttctttcctgtctatatcaatacgtttaacggcatccgcggggttgacgcgaagctgtttgaagtcgcccgggtgcttgaatttaaatggcatcagcagatatccaaagtgatattgccggcagccctgcccaatatattgctaggcattcgcttatcgctcggcattgcatggctcgggctcgttgtggcagagttgatgggctcaagctcgggagtcggctatatgatcatggatgcgagacagttttcacaaacgaataaagtctttgcagggattatcatttttgcagtggttggaaagctgacggattccttcgtcaggctgctggaacgaaagctgttaaagtggagaaacagctacgaaggataaaagatataaaggggagatgaatatggaaattctttggtttataccaactcatggagacgcgagatatttaggatctgaaagtgatggacggactgcggatcatctttactttaaacaagtcgcgcaggcggcagacaggctgggatatacaggagttcttctgccaacgggaagatcgtgcgaggacccgtggcttacagcgtcggcactggcaggagaaacaaaggacttaaagtttttagtcgcggtaagacctggtttaatgcagccttctctggcagccagaatgacatccaccctagaccgcatttcagacgggcggctgctgatcaacgttgtggcagggggcgatccgtatgagctggcaggcgatggcctgtttatcagccatgatgagcgctacgaggcaacagacgaatttttaaccgtttggcggagacttttgcagggagaaacggtttcctatgaaggaaagcatataaaagtggaaaacagcaatctgcttttcccgccgcagcaagagccgcatccgcccatctatttcggtggttcgtcacaggctgggattgaagctgccgcaaagcatacagacgtatacttgacatggggggagccgcctgaacaagtaaaagaaaagatagaaagagtcaaaaagcaagcggcaaaagaagggagatccgttcgatttggcattaggctgcatgtcattgcccgtgaaactgaacaagaggcatgggaagcggcagagcgcttgatcagccacttggatgatgacaccattgccaaagcgcaggcagctttgagccgttacgactctacaggccagcagcggatggccgtccttcatcaaggcgatcggacgaagcttgaaatcagtccgaatctgtgggcggggatcggcctagtcagaggaggggcaggaacagctcttgtcggtgatccgcagacgattgccgaccggatagcggagtaccaggcactcggcatagaatcgtttatattctcaggctatccgcatttagaagaagcgtattattttgcagagcttgtatttccgcttttgccgtttgaaaatgatcggacgagaaagcttcagaacaaaaggggagaagcggtaggaaacacttattttgtcaaagagaaaaatgcatgagtttaataaaaatacagcccccaaacatggtatgatattcaaaaaaagggggctttttttctgaaaacattgagaagcgcggcagtcatttgcctcatagctatgctgtcagcatgcggacattcaaaacagatggaaatcaaagcggcggacatatcagaacttgaaaaaaacagaatggatgtcgcagcttcacaggcattcactgccgaagccgtcaatatcggtgaaggtgtttcttcagctgacatgtacatcgaacattatcaaaagggaaagcttgttgagaggtttggaccggctagtgcagattattcagaggaaaaacccgataccatacaatttgtttattttgagaaggaagagggggaaggaaagaataaacataccaccattcattttggcattgtggataaacagggaaatatagcggctgattcatcggtgaaacgtgacgatagcacaacacaggaaatgactcagaatatttcatcgccggaaccgattactttcgagaagcctgctttgatcggcagcagtattagagggactgacgagacaatgcacacctctgaacataaaaaagagctcattaagcatcaagatgcgttactgtattatgtggaattgcatcattagaatgggcggcttcaggccgtctgttttacaaagcggtatgcttgcttttttgaatggtgcatgatacattttaaatagtaacaatttcgatttaaagggaggctatgtgacttggctaaaaaatcaaaagtggcaaaagagttaaaacgccaacagcttgttgagcaatacgctgatattagacgcgagttgaaggaaaaaggagattacgaggcactcagcaagctgccaagagattcagcaccgggaaggcttcacaaccgctgcatggtaacggggcgcccgagagcatatatgaggaagtttaaaatgtccagaatcgctttcagggagctggcccataaaggccagattcccggtgtgaaaaaagcaagctggtaagaaaaaactccggccgattacagcgcgccggagtttttttcgtttttcttgaaagagatgacgtaggaaaggtgctggatgatcatgatgataaacacaataataatagggaaaaacggaatacgcgattgaaaaagcggataaaaaatgagaagaaccgctgcggcaggcagcgagaagtagacagcgatatatgacgcgcgacatgcttttgccgtcatcatctgctctctttcatcctgctcttcaaactcatcaggcagaagaagctgctttctggcagggcggctttttttctgtaagtacaaataaaccgcaaacgccgcaacaaacagaataaagggggtgaggtttaattcaaataccatcccgccgctctttgtgccgaaaaaagatgctatgccttctgaggcttcaaagtatgaaatcagcgcccagcatgcaaggccaaataaaacaaggtgaaaagctgcttttgttttcatgctcatcttagttttcctcctctaaccaaaagacatcctccattttcatggagaaggctttgcagattttcagtgctaacagcagtgagggaacataatcgcctttttcaatcgctgccacagtctgtcttgtgacgccgaccgtttctccgagtttttcctgagaatagccgaagcgtgccctcagctcttttactttatttttcatcatgacgtctgtccccttcacaatctcgattgattatattgtatagtatacttaacattatgtaaatggaacttaacaactttacaaaaagataactttttttcgacaaaatttttatattcccttgacgaaaaataaataaacatgtaatataaaaaaagtcagagcggtactgttgctgacaatcacaaatgcgggtgtagtttagtggtaaaacctcagccttccaagctgatgtcgtgagttcgattctcatcacccgctccatacatacgttattaacgcagtgtttcgtttctcagataaacgaagtattgcgtttttttatgtaaaaaagaacacgacattcgtgttcttttacgtaagccaatgtactgtatgggtgccgccgtgaatttgttcaaacattttcgttaatgatgataagaggttaacagcgctgcttttctcaatcgatggcgggaaaaaaatgatttgcagcatattcttagtctcgtttgaaacgggatagtggttgacgctgtttttgaaatcgccaaaaatgccgttttcatcagagaaaagcagtatgttttctttttctcccaatgagatccggaccggctcatgaagctttccggcatcataaatcataataggcagagaatattttaatgcgaaaaaatcgattgtgtcatgggccgagtctttactttccatgaattgttccttggatatcgggaccagcatgtcctccattggggttgtttctccctcaaatgaagggttaagctgtttaaagagtttctgccattccttgacgaaggattcatcggatataccgccgtccgcatagtcgaaaaacaaggattcttgaaacaggcggagtctgcctttcagcatttgcggtgaggagccgacttcgatattctcataaatgacagcagctgcatgtaagccggccgcacgttcagtaataacagaatcaagtttgatattcactagcattcactccagttacgtgatatcaacctattataaacgctgtatcgttttatcacaaagaaaggaggctgtgcaaaacatgaacgtttatcagctcaaagaagaattaattgaatacgcgaaaagcattggcgtggacaagattggttttacgactgctgatacttttgacagtttaaaagaccgtttgattcttcaagaatcactcggctatctctccggctttgaagagccggatatcgaaaaaagggtgacgccgaagcttcttttgccgaaagcgaaatcaatagtggcaattgctctcgcatatccttccagaatgaaggatgcgccgagaagcacgagaactgagcgcaggggcattttttgcagagcttcctggggaaaagactatcatgatgtgctgagggaaaagcttgatctactggaggattttctaaaaagcaagcatgaggatatcagaacgaagtcaatggttgatacaggtgaattgtctgatcgcgccgttgcggaacgtgccggaattggattcagtgcgaaaaactgtatgatcacaacacccgagtatggctcttatgtgtatttggcggaaatgatcacaaatatcccttttgagcctgatgtgccgattgaagatatgtgcgggtcctgcacgaaatgcttggacgcctgcccaacgggagcactggttaatcccgggcagcttaatgcgcagcgctgcatctcttttctgacccagacaaaaggatttttacctgatgaattccggacaaaaatcggaaaccgcctgtacgggtgcgatacgtgccaaacggtatgccctctcaataaagggaaggattttcatcttcatccggaaatggagcctgatcctgagattgccaaaccgttattgaagccgcttttgaccatcagcaatcgggaatttaaggagaaattcgggcatgtctcaggttcttggcgcgggaaaaaaccgattcagcgaaacgccattctcgcgcttgcgcattttaaggatgcttccgcactgcctgaattgacggaactgatgcacaaggatccgcgtcctgtcatcagggggacagccgcatgggcaatcggaaaaatcggagaccccgcctacgcggaagagcttgaaaaagcgctggaaaaagagaaggatgaagaggcaaagctggaaattgaaaaaggaattgagttgctaaaagcttcaggcatgactaaacaaggcctgtcctgacatacgtatagagcagaaggaaaaaacacttgagatcatccaagtgttttttctctataaaaaagtatggcgggtggggtgagcttgaagtacattttagaacaattagcggaggagcggctgggctttctggttaacgggcatgctatgagacaggagtctcaagtcggagaccttaaagtcatggagcgtaagaaaaagcttctggaaaaacgtaaagttgacatcataaaagcgaaagcaaaggccgtgattaatcatgtgcgggttgaggatgacggaacgacctgcctttcgtataccatccattacgaatacgtgtgtaaggaacaagatgacagcttgtatatagaagagcacatagaggagcgaatggctttcctgtatgatcacattttgattagtgatcaggaaattgcgaaaaagccggctggatttcatgaagggaccagtattattgactattctgaagctgaagaggaaagagaagcgtttggcagggcttttcaatacgatcgtctcggcgctgtccaatatgccgagaaattttggaacaagcgcaatcctgcttataaaaatttcagcgataactgtacaaattttatttctcagtgtcttcatgcaggaggcgcgccgatgcgcggtcatccgaacaggggatcaggctggtggatgaaacaaagctcatggagctacagctggacggtggcgcactctatgaaaatgtatttgtcgaattcaaaggccggactgcgtgcggtgcgggtgaaatcagcggaagaactgatgccgggcgatgtgatttgctatgacttcgaaggagacggccgctttaatcatacaacgattgtcgtggcaaaggacaaaggcaatatgccgcttgtcaacgcccagacctatgacagcaggatgaggtattggtcatatgaggattctacggcatacacgccgtcaatacgatatgccttttttcatatcgttgatgatacgacaaaagagtaattaatgttataatgatgggcggataagaaaaacagaggtgaacattgtggcattacatgtcgttttatatcaaccagaaattcccgctaacacagggaatattgcacgtacttgtgcagcaaccaatacaacgctacacctgattcgtccgctcggcttttcaacggatgataaaatgctgaagcgtgccggactcgattattgggagtttgttaacgttgtgtatcatgattcgttagaagaattgtttgaggcatatgaaaaaggccagtttttctttattacaaaattcggccagcagcctcatacatcatttgattacactgatcttgacgaggattatttcttcgtgttcggaagagaaacaagcggtttgccaaaggatttaattcaaaataatatggaccgctgcctgcgtcttccgatgacagagcatgtcagatcgttaaatctgtccaatactgccgcgattcttgtttatgaagcgctgcgccagcaaaattaccgtgatttaaaatagtgaaaaaacccgctcatcgatgatgggcgggtttttttgcggatgttgaaatgctttgtttcgtttttgggcttaacaacgtaacagtgttatgttacaatgtacccatcaaaggagctggacttatggaagaacaattaatctctaaaaaagaattacttgaaagaacatcgatttcatacggtcagctgtatcgatggaagcggaaaaacttaatacctgaggaatggtttattcgtaaatccacatttacagggcaagagacgttttttccgagagaggagattttaaaacgtatatcaatgattcaaaagatgaaagaaaatttgtctttggatgaaatgagggaaatgctgtcgccgaaaatgaaggatgtcagcatgaccgctgatgaattgcttcataaaggtttggtttcaaggcctgctcttgaagcctattcagaagacggaggaagtccggttttttcatccagcgatttgctttcgctatatgtgcttgagggactgctgcagtctggaaatgtcagccttgcagaagcaaaaatggctgcagaggtattaaagaagcatgataatgaagagattgaaaaacagacggagctgattgtgctccgcaagctcggtgtcacaacttgttttatagcggctgcggcggacagcattttgtttgaatcatccgtaaaggttgtggaacgggtagatttattaaaagcttcagaggaattaaaaacaacatttatgcaggagggccatcgatggatgtagtggaaaagctggtgataaacggatcaggaagttcaaagggaggaacatttcaatctgttgagattaatggcagcgggacagtggccggggacgtggagtgtgacactttttcttttaatggaaacggaaaagctgacggcagcgtcaaagcgaaagcggtaaccatcagcggttcaggaaagatacatggagacgttgaagcagaatctatccggatgaatggcacttgttttattcaaggagaggtatctgcaaaacaattgaaaatcgctggatcatcaacatttggcggcactgtcaaggctgatggcattgacattagcggaaaagctgtcatggaagcagattgtgaaacagaaacctttcaatcagaagggaaatgcaaaatcagcgggcttttaaatgcagaccaggtgatcattaagctttctgcaggggaaagctatgcgcgggagatcggctgccgccatcttcaagtgacctgcagaaaaggaatgctgacattgctcagattgatgccgcagcctgttctaacagcagagctgatcgaaggtgacgtgattgaattgacaaatacaaaggcgaaaaccgtgcgcggaaataaagtgatcatcggcccggattgccagattgaaaccgtcgaatacagcggggactatacctgtgatccaagcgcatcggttgaaacatccacaaagttgtaaggaggatcgtaatggagacaacaaaactgggaaatttaaaattatatggcgctgggcatgccgcaggaggcgcgtatcacaatgtcagcatcaaaggagaaggtgtagttggagaagggttgtctgctgtaggctgccgcatatacggaacgggcctttttctcggaaaagcagagactgagcggctgcgtgtgctcggagaaagtgaatgtaaaggcgatctgacagccggcaaaatcaatatatatgggataatgaaagtcagcggctcacttcaatttgatcgattcaatctgaaaggccagactgaaattggcgggaatatgactggagaatcctgcgatgtgaaagggaagcttagcgtaaaaggtgattgtgaaacagaaatgttccatgtcacaggctgtgttgatgtatcggggttattaaattcgggtgagatcaagctgggattgagccatgatataagccatgtgcaggaaatcggcggaacaacaattacagtgaaaagacgcgcgagtttttttaatcggaagaaagtgaagctgatcgccgatgtcatagaaggcgatcgggtttatttggagaataccgaagcggcagtcgtcaggggaaaagaagtgatcatcgggccgggatgcagtatcggaacaattgagtacgaaaacaaatatgaatgcgatccgcattcacagattaaagaaaaaacaaaactgtaaaacattgttctgttatacaaaaagggtgctctttcaggagcacccttttttattcttttccaggcttgctttcgtatcctgcggtaaaaattgatactaaaaaagtgacaatgacacccatcatgatgattgttttcaccgtctctccccctcttcaatttttccgtgctgtccgagtctggatgattctgtatttttctttattatgaacggtcgcagtctgccttgtcaacgatgtataagtatctttatttttaagaaaccaaagcatgtatcacgagatggcggcatagattgtatcaaagtaccttatttgcatagtgtatcaaacatgatagaggaggtccttatggatatattaaagaaaattgaacagtacagagaggaagagcagcggctgaaatgggaaggaactttcgccgattatttggagattattaaagaaaatccgatggtcgcgcaatctgctcattctcgagtttttaatatgataaaagacagcgggatagaggagattgacgggcgcaagaagtacagtttttttgaccgcgagctgttcgggcttgaagaatctctggagcgtcttgtggaagagtattttcatccggctgccaaacgtctagatgtcagaaagcggattctattgctgatggggcctgtgagcggcggtaaatccacgctggtcacaatgcttaaaaaaggtctcgaagcgtacacgctgacagataatggcgctgtatatgcgattaaaggctgcccgatgcacgaggaccctctacatttaatcccccatcatttacgcgatgacttttacagggaatacggcattagaatagaaggaagtctttctcctttaaatgtcatgaggctggaggaagagtacggaggaagaattgaggatgtgaaggtggagcgtatcttcttttcagaagataagcgtacgggaattggaacattcagtccctctgatccgaaatctcaggatattgccgatttgacggggagtattgatttctcaacaatcgccgagtacggttcagaatcagatccgcgtgcttatcggtttgacggagagctgaataaagcgaaccgcgggatgatggagtttcaggagatgctgaaatgtgatgagaaatttctctggcatttgctttccttgacacaggaagggaattttaaagctgggcggtttgcgttaatttctgctgatgagctgatcgtggctcacacgaatgaaacggagtttcgctcatttatttctaataagaagaatgaagccctgcactcaagaatcatcgtgatgccggttccttataatttaaaagtgtctgaggaagagagaatttatgaaaaaatgattgcagaaagcgatgtggcggatgttcatattgccccgcatacgttgaaggtcgccgcgatgttctcaatccttacccggttaaaagagccgaagcggtcggatattgatctggtcaagaaaatgagactgtatgatggggaaagtgtggaaggatataactctgtcgacgttgaggatatgaaaaaagaatataatgatgaaggcatgagcggaattgatccgcggtacgtgatcaaccggatttcttcaacgattatcagaaaaaatatggaatcgattaattctctcgatgtccttcgctccttaaaagaaggtcttgatcagcacccatcaatttcaagcgaggacagggagcggtatttgaattttatttctgccgcccgcaaggaatatgacgatattgcgaaaaaggaagttcaaaaagcgtttgtttattcatatgaagaatcagcaaaaacacttatggacaattacctcgataacgtagaggcctattgcaataaaaacaagcttcgtgatcctttgacaggagaggaaatgaaccctgacgaaaagctgatgagatccatcgaagagcagatcggcatttcggaaaacgccaaaaaagcgttccgcgaagaaattttaatccgcatctcggcctatgcgagaaaaggcaagcggtttgattacaattcccatgaaagactgcgtgaagctattcagaaaaagctgtttgctgatctgaaggatgtcgttaaaattacgacctcaacaaaaacgccggatgagcagcagctgaaaaaggtaaatgaagtcgtggcccgtttaattgatgagcacggctacaactcgacgagcgccaatgagctgctgaaatatgtcggcagcctgctgaaccgataagcaacgtgacccgtccgaatagggcgggttattttgtcccattttctaaatagtttgtcaattaaacgtgcatatgtgcatatgatgaatataaatcttttcaaaagacttgtttcataatctggcacaagccggaatacgtatgtatcacgaccacaaatggttaaggaggggaattcatgtcccaaaatgacagcggccattttttgatttctgaggaaaactggtccctccatcgcaaaggcttcgatgaccagcaacgccaccagaaaaaagtgcaggaagcgatcaaaaacaatcttccggacctcgtaactgaggaaagcattattatgtctaatggaaaagatgtagtgaagatcccaatccgttcacttgatgagtataaaatccgttataactatgataaaaataaacatgtagggcaaggagacggcgagagccaggttggagatgttgtggcccgggatggatcagacaaaaaacaagggcctggaaaagggcagggtgccggtgatcaggcaggcgaggattattatgaagcggaagtttcattaatggatttagaagaagcgctttttaaagaattagagcttccgaatctccagcaaaaagagcgggacaatatcattcatacagatatcgagtttaatgatatccgtaaaacagggttaaccggtaatattgataagaaaagaacgatgatgtcagcctttaaacgaaacgcaatgtcaggaaaaccgtcgttctacccaatttatccggaggacctgaaatataagacgtggaatgacatcacaaagcccgaatcaaaagccgtcgttttagccatgatggatacaagcggcagtatgggggtttgggaaaaatacatggccagatgcttctttttctggatgacccgttttttgcggacaaaatacgagactgtggaaattgaatttattgcccatcatacagaagcaagagtggtctcggaggaagattttttctcaaagggagaaagcggcggaacaatttgttcttccgtatatcggaagtcgcttgagcttattgatgaaaagtacaatcccgcccgctataacatttacccgtttcatttttctgacggtgacaacctgacatctgataacgcgcgctgtgtgaagctggtcaatgatattatgaagaaggccaatctgttttgctacggcgaggtcaatcagtacaacaggcattcaacgttaatgtctgcatataaaaatgtaaaagatgagaaatttaagtactatattttaaaacagaaatctgatgtttttcaggctctaaagaactttttcagaaatgaagagtctggtgtaagccatcaattttcgtaatgaaaagcccatttcagggcttttttttatttaataaaagcaagaaaacgcttgcgaaaaaaatacgggagaaaaagaaatttttcctttgacaaatcttctttcatttattaatattttatcttgtgaactattattgaggaatgaggtgaaaaggagttgactgaatcagaacgtgctttgctcacttttgaacagctcttcgatacgtctcgggcgatatataaaaaacagaagaagatattggagattgtgcttgagccttttgatattacagtccttcaatatttgctgatgtttaaaattcatcaaagcggaagcaccccgctaagcaagctggcaatgtcgcttgatcttaagcctgcttctgtgacgcggatgacagatattctgtataagcgccaattgatgaatcgatatgacagtccggatgaccgccgtatcgtcatgattcagttaaccgaagagggggaagaactgatagaaaaagccgctgtgcaatatgcaaaaatgggtgctggcttgtaccaaaagcttgatacctcccagctgcagtatttgcgcaaactagccggaagcttaacgaagcttgctgaaggctgttcagaaaaaagcggtaattaaaaacttctcacatattttcaccagctttccgcaaaatgatagaggatgaaacgaaaggagaaaacaaaatgaacagaggacgtttaattctgaccaacattatcggtttgattgttgttcttgcaattatagctggaggtgcttactactattatcaaagcacaaactacgtaaaaacagatgaagcaaaagtagcgggcgatatggctgctattactgctccagcggcaggtaaagtatctgactgggatctggacgaaggaaaaacagtgaaaaaaggcgacacagttgcaaaaatcaaaggcgaacaaactgttgacgtaaaatccattatggatggaacaattgtgaaaaacgaagtgaaaaacggacaaaccgtacaagctggtacaacaattgcacaaacgattgacatggacaacctatacatcacagcaaatattaaagaaacagatattgcggatattgaagtaggaaatagtgtagacgtagtagttgacggagaccctgatacaacatttgacggtactgtagaagaaattggctatgcgactaactcaacttttgatatgcttccatctacaaattcaagcggaaactacacaaaagtaacacaaaaaattcctgtgaaaatttcaatcaaaaacccatctgataaggtgcttcctggaatgaatgcatctgttaaaatttctgagtaaaacagatcagtcatcaaaccatgaaaggaggttgtcttagatggctacaggcaaagaaaaaaatgcaaaaaaccctatgtcattgctgattgtgctaatggcgggtttatttttggcaatcctaaaccaaacactgcttaatgttgcaatgccgcacttaatgactgaatttggcgtaagtgcaacgacgattcagtggcttacaacaggttacatgcttgttaacggtgtattgattccgttatctgctttcctgattacacgatttggccaacggagtctctttctcgtcgcgatgttttgttttacgctcggtacgttagtctgcggtatcgcacctaacttctctacaatgctgatcggccgtttgattcaggccgtgggcggaggtatcttgcagccgctcgttatgacaaccattctgttaattttcccgcctgaaagcagggggaaaggaatggggattttcgggctagcgatgatgtttgctccagcggtcggcccgactctttccgggtggattattgagcattatacatggcgcattatgttttacggtcttgtgccgatcggcgcaattgttatcattgtggctttcttcatctttaaaaatatggtggagccgcaaaaaatcaaactcgatactcttggcgcaatcctatcgattgtcggattcgcctccttattatacggagtcagtgaagccgggtctgacggctggaccgacccgattgtattgtctacagttattatcggagccattgcaattgttgcttttgttgttcagcaattgcgtcatgatgatccgatgcttgatttcagagtgtttaaatatgacattttctcactctcgagtgtcattaatatcattataacagtggcactttacactggtatgttccttttaccgatctatctgcaaaacctggtcggctttacggcgcttcaatccggtctgcttctgcttccgggtgcgatcgttatgctgattatgtcaccgatctcaggtattttgttcgataaattcggaccgagaccgcttgcgattatcgggcttctcgtgacagtggtaacaacatatcaatacacgcaattgacaattgatacaccatatacacacatcatgctgatctattcaattcgtgcatttggtatgtctctcttaatgatgccagtcatgacagccgggatgaaccagcttcctgcccgtctgaacagccacggaacggcgatgagcaacacgcttcgccaaatcagcggatcaatcggaacaagtttaattacgacgatttatacaaaccggacgacattccattattcacaaattgcagataaaacaagcacggcggacccgaacttcctccatgcgttccaaaatgcagtttcgaatttaatggtgaatatgaatgtgtcttatgatacggcgaaaacatatgtgtactcacatatttataaacacgcgtcactcgattccaatgtcatggggataaatgatgcctttatgtgggcaaccttattctgtgtagcaggtttgattttaagtatcttcctgcgtgacgtcagaaaagataaattgcgtaagaagaaaaaagaggagctttcattacttcctgctccaaaagaagctaaggaatcttaatctgtacagggaggtttcctgaatgaaaatttatgtagtgtatgatagtgaaggcgaacatactaaagtgcttgcagaagcgattgctgaaggcgcgagagaaaacgacgcggctgaagtgttcatcgaccatgtagatcaggctgatatccgcaagcttaaagatatggatgcgattatttggggatgcccagggcatttcggaacaatcagctccggtcttaaaacttggatcgacagacttggctacttgtgggctgaaggcgagctgatcaacaaagtcggtgctgtcttctgcacaacggcaacaacacacggcggcttggaaatgacaatgcacaatttaatcacgccgatgttccaccaaggcatgattgttgtcggactgcctggcaacgtgcctgaaaacgcactttatggctcttattacggagcaggtgtcacttgtccggtagacagtgatgagttaatgtctgaggaaggtattcagcttggacgcgcgttgggaagacgtgtcagccaagtcacaggaaacctaacagcaggacagtaaggagaggttgaaatggccattattatagcaataattgctgctgtcattgtcattgcggcccttattacatttaacgtccgcaacgcctcacctggacctgagaagcaagaagcaaccgatagaatcgcacctccagaagagggaaaaaacgaagcgcattaccctgctgaagcaagggctgccgagcatacgccatccgttgtcaaaaacgattctccaaaagagaagcgtgacacaatgggtgatgatatttacaggcaggcgctgcaaaagtttaagcattctgatgaagttcatgcagaagaagaggtcactgaggaaagtgacaaaatgcaggaccgcagctatcgtgatgcgctgctctctatgaaaaataagaaaaagtaatgaaaaaggcaaatccgttttctcatgcgggtttgccttttttgctgtttccatcaattcggtttttatcaaataaatccatggaatatgttgtattccatcttgatctagtgtactatgttactcatacaccgagggttttttctgggaggtaaagacatgaattcttttttaggtttattaaagaaagatatcaagctttcaagaatgtggctgctagtatggatatgcggaatcattttcttattgggaacaggccatattatagcttctcgcacgaaagaacctctagtcatttttggtttttttgttgcagttgctttttttctgcttttcttatctcctgtttttgtgttttatcaccttcgcaaggaagggaaatcacagctttggctgtacaatccaaatggcggcttctggctgttttcttctaaattggcagcatctttgctctatcaatttgtgattcagttggcattaacagcctatggcatatggatgtatcatatgctctctgtaaaaaatctgctggagcatcaagttgatataacgagtacagtggctttgctgaatatgtatgggcttatttcttcgttagatatgtcagtaacagtcattgtgttttggactgtttttcactctctcagaaattggcgcagaatgcggtgggctgcgatggttctgttggttgcagtgtggttattcttcgatgaatacatcataagccctttggttgaatctcaaaagcatttctggcctgtaacagtctattgcaattttgatttccacttctacaatgtttggagattggaattaaaacctatccatctgtctgtgctagggtttcctattactttagtcatcacattcttgctgctcattatggcttcaaaactgcttgatcgtaaagtagaggtgtaaatatggacaatcaattccaatcctcgaaaccgatttatctgcagatcgctgatcagatcttttataggctggtcaggaaggagctgctcccaggagacaagcttccttcagtaagagaaatggcgattcaaactaaggtaaatcccaatacaattcaaagaacttacagtgagatggaaaggctgggtattgtggagacaagaagaggtcaagggacgtttattgcggaaaaagcagaaatcgtagacgagctgaaagacaagctgacacgagaggtgctggaaggctttgtcaagcaaatgaaagagctggggctaacgaaagaggaaatggtagaagggattaaaacattcacagagggaggctaaaatgggaatcaagctagaacatgtatcaaaaaaatacggccgccatacggccgtcaatgatgtgtcaatcaccctatcatccggacggatttatggcctgatcggaccgaacggcagcggcaagtcaacgaccctgaaaatgatggctggccttctgtttccgacttcaggatttgtgaaagttgatgaagagcaggttacgagagaaatggtgcgtcaaacggcttatcttactgagcttgatatgttttatccgcatttcactgttaaagatatggtgaatttttatcagtcgcagtttcctgattttcaaacagaacaggcttataagctattgaatgagatgcagctgaatccggaaaaaaagatcaaaaagctatcaaaaggaaatcggggccggctgaaaatcgttcttgctttagcgagacgggcagacgtcatcttgcttgatgaacctttttccgggcttgatccgatggtcagggattccatcgtaaacagccttgtgtcgtacattgattttgagcagcagattgtcgtgatcgcgacacatgaaattgatgaaattgagactttgttagacgaagtaatcatcctcgccaatggagaaaaagttgcgcagcgtgaagtagaagatattcgtgaacaggaaggcatgtctgttttgcaatggtttaaatcaaaaatggaagtttgctagaaagaggaggaatatgatgaaaacagtgttggaattgaaaaacgtgactaaaaacatcagaggccgaacgatcattgatgatctcagttttacgattcgtgaaggcgaggtattcggttttttgggaccaaacggagcggggaaaacgacaaccatccggatgatggtggggttaatgaagctgtcgaaaggtgatgtcctcatttgcggccaatcaattacgaaagaatatgccaaggcgattaagcatatcggagcgatcgttgagaatcccgagctgtataaatttttgagcggatataaaaatctccagcaatacgcaaggatggtcaagggtgtcacgaaggaaaaaattgatgaagttgttgaactggtcggtttaacagacagaatccacgacaaggtgaaaacatattctctggggatgagacagcgtcttggcttggcacaatgccttctgcacgatccaaaagtgctgattttggatgaaccgacaaacggccttgatccggcggggatcagagaaatcagagatcatttaaagaagctgacccgagaaagaggaatggctgtcatcgtttcaagccacctgctgtcagaaatggaactgatgtgtgatcgaattgcgattctgcaaaaaggaaagctgatcgatattcaaaatgtaaaagatgaaaacattgatgagaacgatacatatttcttccaggttgagcagccgaatgaagccgctgctgttttaaatcagtacgatttgctgagtaagacaaatggtgtagaaatcaaactggctaaagacgaagtccctgcggttattgaattgctggtgatgcagcaaatccgtatttatgaggtcaaggtcataacaaaatcattagaggaccgtttcttagaaatgacaggtgaaacaaaagaggaggttcagcatgcttaatttgatttataatgagtggctcaaaattttcagccgtgccggaacatgggtgatgatcggaattctggggctgacaatggttggatttgcatttttagcgaatcatttttctgctggtgaatcaaattcccattggaaacaagaacttcaagcacaaaacgccgaattaaagaaagaaatcaaagaagatccttcactgaaagatgggtataaagaaacaatcacactcaacgactatcgcatcgagcataatatccctagtgacacgggctatacggtatggtcttatgtaacggattcagcaaactttaccatccttaccggtctgtttactattatcatcgcggccggaattgtcgcgaacgaatttaattggggaacgattaagctattaatgattcggccgctcagccgttttcaaattttgatgtccaaatatattacagttctcctgtttgggctcctgttgctgttgattttatttatcggttctactttattagggttgatcttcttcgggacgggtggtgaaaccgccgcgaatattcatttaatctataaggatggccatgtcattgagcaaaacatgatggggcatttggccacaacgtatctttctgaatccgtctcagccttaatggtggcgacgatggcgtttatgctgtctgcagtattcagaaacagctcacttgcagtagggttttccatctttttattggttgccggtacgactgccactgcatttattgcagcgaagtttgactgggcaaagtatatattgtttgctaatgtcgacttgactcagtatgtggatggcacaccgttaataaaagggatgactatgacgttttctatcgtcatgctggcgatctactttatcatcttcttgttgcttgctttcggaatcttcatgaagcgggatattgcaaactaataaagaaagctgttttgcataagcaaaacagcttttttgtcaaaataaaaactgcaggtttgcacctgcagtttttcatatcaatttatgcttacgcttctttagtaacgttagcagcttgtggtccgcggtttccttcaacgatttcaaaagaaacagcttggccttcttctaaagttttgaagccttcgccttgaatagcagagaaatgaacgaatacatcgtcttgaccttctacttcgatgaatccgaaacctttttcagagttgaaccattttactttaccttctaacatgaaatttcctcctaaagcgatcataacgcttaaattcactattcttgctcttaacaaactttcaagacgaaaactcttacaaaactttcttcttaaagatagttcgaacaaaaataattacctttactctaccagtaatcttcagaaaaaacaactgcttattgaaacttttttcggaaaataccatatttatttttcaatttgatatttatttgcggaaattcatctgctttctcgatatgtgatcatacgtttgccttagtattccttcattttgggaagataagtaataggaattgacaaccttattggatatgagtaaggtaaaagttaatcaatattacaaatgacaacgtttatcaactaagagagcgtatgatttttatgtctgatattgcttgcatgctctaatacatagataggagtatggtcacaatgaaaaagtggcttatatgcagtttcgtccttgttcttctcgtttcatttactgcatgttcaccgtctgcagaacatgaatcgataaaaatcgggattgctgagtctgacggggcaatatggaactatattgctcaaaaggctgaagaggcagggctggatattcagctgatccctttttctgattatgcggagtctgatatcgcacttgctaacaaagaaattgatgccaacgcctttcaaaccatttcatattttcagtcgttcacccaaaaatacaaacttaatttgacgccgctcgggacgacatacataacgcccatgggcatttattcaaaacgatatgaccgaatccaagatataccgcgaggagctgtcgtttctgttccggataaagcgttcgattttggcagggcgcttacagtgctccaggaagcgggtttgctaacgctgaaaaacggatttaacggaacaggttcagttgatatgattaaagataatccgagacacctgaaattaaaagctgtccggcaacaggatgcagtgagcggtgccgacgtgtttgtcatgaaaccatcagaagcaaaaaaagcgggcctgaacccgaaaaagcatacgctaaagagcggcggactcatgtctgaggaagagatgaatttgattgttgtcagagcggaggatcaagatcgggaagcgctgcaaaccattcttgagctttatcaagcagatgatacagcggcatttatagaaaaagaatatcagagagatcttgtcccggcttttctgcctttgaaacgtctttcagattggaagaatgaattcgaacattgaattcattcttttttttctgaaaaacacactctgttccgtcccgtttctttcgctttgtaaagcatttgatcggcaagaatgggcaaggatcctggctgttccgtattattggggtaatgagcggcccctagtgatatcgtaactgaaagctcttcgccgtttgttaatacaatcggtgcatcacttacagtgctcctgatccgttcagcgatccgggctgctttatcaagagaacagttcggcaggagaacggcaaattcttcaccgccgatccgagcggcaggatcagtatttcggatgctctgcttcagacgtaaccccagctctttgagcacctgatctccttcatgatggccatattggtcattgatggtcttaaaatgatcgatatccatataaatcagtgcaaattgaaaatgcggggtatcggccgcctgctgatacagagcttttgtggtttcttcaaactttcttcggttatacacgcctgttaaaaagtcaaagtgcgcctgaaacttatattgtttaaaaagaagatgtgcatttgtttcatgatcaataatatataaactgagcatgccgcccgctattgatatgatccaaaaatacaaatgaagttcgtatgaatgtaaatctataagaaaataaaaggaaaaggagatcaagctatttgtgattattaaaagatagaaagcatgttttagttgaactttttttcttctagaaacaatgagtgacgggatggcagcgatacaaatgataataaccgagtatagtgcagatgtgttcattgtaatcagcaagcggcctgcagtgatcatggccagggccgttgccgttgaaacccagcctccataaagagcggcaatcataatagggatatttcgaagatcaataattgaatgctgataggtaaatccaaaaaccatcagaataaccccgagcaaaccgcaggccagtcctttaacagcttgaaaggatatgctgtcttttttatgtactagcctttctttaaacaggtgggtgaagagataattaaatgtgattaaaatggtcaaatttacaaacagttctttcagcaaatattatcacccttatataaggtactaaagatggaagggaaagaaaagaaaaaaaaaggcattatataaggtttttttacttgaattgataagttaaaataattctcacttgacccatcggaattagtgtaatatagtaaatgagaaaatttgaagggagagtttacctgctttggagactttactggttgtattacatgtatttattttatttttacttatcttagggctctttgttatgcagaaaaaacatgtttccttctctaaacgtgtatttactgcgctggggctgggaattgtattcggatttgcgcttcagctgatttacggcccgacttcaaatatagtcattcaaacagccgactggtttaatattgccgggggcggatatgtcaaattgcttcagatggttgtcatgccgctcgtctttatttcgattctcggcgcatttacaaagctgaagctgacaaaaaatcttgggaaaatcagcggtttgattatcgggattttagtagcaacaacagccgttgctgcagctgtcggtatcgcgtccgcgctttcatttgatctgcaggcgattcaggttgaccaaggaagtacagagctttcacgggggcaggagcttcagcagaaatcagaggatatgacagcgaaaacgctgccgcagcagattgttgaactgctgcctggaaacccgtttttagatttcacgggagctagaccgacttcaacaatcgctgtcgttatttttgccgctttccttggagtggcattcctcggcgtcaaacacaaacagccggaacaggcagaaacatttaaaaaactggttgatgccgtttatgccattgtcatgcgtgttgtcacactcattttgagactgacgccttatggggtgctggcaatcatgacaaaaacaattgccacgagtgatcttgacagcattttaaaactgggcatgttcgtgattgcttcatatgccgcgttaatcactatgtttatcattcatttgctgctgctgacgttcagcggcttgaatccgctgatttatttgaaaaaagcggtgcctgtacttgtatttgcatttacgtcaaggtctagcgcgggtgctttaccgctgaatattaaaacacagagaagcatgggtgtaccagaagggatcgcaaactttgccggttcgttcggtctttcgatcggccaaaatggatgtgccggcatttatcctgcgatgctggcgatgatgattgctccgactgtcggccaaaatccatttgacccggtgtttattatcactgttatcgcagtcgttgccatcagctccttcggggttgccggagtcggcggcggagcgacattcgcggcgcttcttgttttatcatcattaaacatgcctgtcgcgctcgccggtttgttaatctcaattgaaccgttaatcgacatggggcgtactgctttgaatgtcagcggaagcatgacatccggtcttattacaagtaaggtcacaaaagaaattgatcaaggggcatttcatgatcaatccagagtgattgaagctgaagaagcgtaacatatgaaaacgtgtaatccaagaggattacacgtttttttaacggccgggttctaaatcctccagcatttccatcatcgtgttgtcgtccatgacattcattgcgctttgttcaaaatgaatgggttcagcataatgcggctgtctttttttcgcggctgactcagtttgcctagtttgagactgtgtatgctgatgcagtggttgctgctgtccagcgtgctggtgctgacggccattttgccgctggctttgatgctgcgaacggtcctggttatcaccgctgcttccgctgcttccgctaaatgcttgtttgaccatgtttcctacattagaagcatcaaacgtgttattttctgaatttcgtctgttcatttgtcctgtgataaacccgctaattctttggcggatctgaggtgataatgcagcaataagcatagttgatcctatgatcaatgctgcggggctgattcctcttcgctggttgaacaacatgatccctcctttgcagtgtattcatattttccccctcgttagacaaattaaccgttatatttcccgggaaagcatttcctccagatttgcatgcataattaaagccagttagaaaaacctataagtaaagtgataaaggaggaattcacatgtttggaaaaaaacaagtccttgcgtctgtgcttcttatccctttgcttatgactggctgcggtgtggccgaccaaggtgagggcagacgtgataataatgatgtaagaaacgtaaattatcgaaatccggccaatgacgatatgcggaatgtaaacaatcgggataacgttgacaacaatgttaatgataatgtcaataacaatcgtgtaaatgacgataataacaacgaccgaaaacttgaggttgctgatgaagcagctgataaagtaacagacctaaaagaagtaaagcatgccgatatcattgtggctggaaatcaagcctacgttgcagtcgttttaaccaatggaaataaaggtgcagtagaaaacaatctgaagaaaaaaatagccaaaaaggtaagatctactgacaaaaacattgataatgtttacgtttcagctaatcctgattttgtagagcgtatgcaaggatatggaaaacgtattcaaaatggtgacccaatcgccggattatttgatgaatttacacaaactgtacagcgcgtattccctaacgctgaataaataaaaaaagccgcacaatttgtgcggctttttctttgcgttaatgacacactgcgaactcaggctgcatagagtaaaaataaaaaggtacaagacggaccggctcagggagggagacgtttgcgggatggcataggaaagcgtgcggcatccgctctattcctgtgcggagtccttgtgatgctggctgtaagctcagccatcgtatcaagcgcgatgtatatcctgtcttttccaggtcaggcatctggaataacaaaagaacaagtgacgaagcacatgaagaaagagtcattcaaacaggccgatatttattacacttctaaggaaaagtccttactgccattgacgaaagaaacgcttgaatatgcggtcagtattaatcagattatgattggatattcgaatcaaaagcctattgacattattttttttcctaatgaaaaacagatggaggcttactccggtttattggatgtagttggtttttattctgagcgggagcagttgattggactgttgcctgaagagaaaaagaaactgttagaaggggacgaggtagcggtttatttgtaccagagattgttgattcatgaatactcgcaccatgcgtttcatcagaaattgaaggagcttgagacggatcccgatgagtttccgttatggtttcatgaagggttaagcgagtggattgcgaactatgaattgctcatagatccgatcacgttttctgtcgtgccctttgaccgtttgcagactgatcgagactggcaggaagccagagccgaatatgacactgatgtctatttgcaaagcttttatatgatcgatgagctgaccggcaaatacgggaaagacattatttcagaaatgattaaggaaacagcaaaaaaaggggactttgaaaaagggtttaaatcagcaacaaaggaaagtcttgatcattttgaaaaggattttaagaagaaatttgaaaaaaacagtgcggcattggatagtatctatccaatgcctttgttattagtgaagtccttgctgacccattccgccttgtgtcggaggcatttgtccttgggcaggggcgaatgaatttctcagctgttccatatcctgcgcatcaagctgaggaacctggtaatagccgtgtttgttttggtatagaaaaatttcaaatgccatttcaacatactcctgaatttgcgcagacagtacgcgtcttacggccggatttgtcatttccagagacgccatcgtcagcatagaagcttgtgctttaatcgcgcaaagcatttgtcggctgatgatgctgtcatcaatatcattcatggattgaacaggttttttaggctgtgacggctgcatgccgtaaacagcctggttgtcctccttcatcatataagttgctgttttttgtgaaggttcgcttcctgttttgaagcattctgcagttatattgtattgagatgtaatgaattgatgttgacgatcaaggatgtttagtaattcttgatccttacagaattgtctcagcatcatatactgatcaagcacagtaagtgttccggaaagcacctcatgcatatcaaacatttcatgtccgccgtggtttttatgcggtttgccaggaatacctttgttcatttgggattgctgctgctgattgaactgatccaaaccgaattcctccttttttttcagatcaactgtattttgtgtcagtctgccgtgtattatgcagaagcctgaaaggaattatatgctgtctgtcgaaatgataagcagacaaaatcgttgtcattatgtgtatattaagggaggaaatatgatgaggcgtattctgcatattgtgttgatcacggcattgatgttcttaaatgtaatgtacacgttcgaagctgtaaaggcagctgaaccgcaacagcctatatcgattgagaaggcaatacagcaaaaagaaggacaggcgcttgtcgaaggatatgcagtcggccaggctgtttccccgcagcattataagctgacaagccctttctcaaatgattataatgtcgcgctggcagaccgtaaaaatgagacatcgcccgaacacatccttcctgtgcaaatcccctccgccttcagaagccaatttgggctgcaaaccaatccgcttcttcttgggaaaaagataacggttcaaggaaagcttgaaaattactttaacacgacaggacttaaaaacgttcagtcgatgaacgtaaccgatgacacgaaaactccgccggctgaacagccagtgaccataaatgaagcacggggaaggctgaatgaagaagtaacgataaaagggatcattacagctgatcaaaacgcaatcggaggcgggaagctgtcgacctttttgcaagatgaaaccggaggcattaacatttattcgccatcccctgaacaatttcccgaattaaaagagggtatggatgtcacggtgacagggaaaatcacgtcttaccaggggctgaaagaaatcgttccaagctcatcaggcatcaaaatcaaccagtcaaatcaatccctccccgccccaaacacttaacaatcaatgaacttattaacggcagcctaggtgatcagtatgaaggacgccttgtgaaactaactgcttttgtttccttaattccaagttctcctgccggcggcggttacaatgtaacaatgattgatgacgaccatcatgcaatgacgctccgggttatgaatgaaacaggggtgataaacgagcttgatgagggcaaatggtatgaatttaccggtgtgttaagcagataccaaacctttcaactgcttccgcgaaaatcggctgacctgaagctgcttgaagagcagcccgcacctccgtctgcggagggagaatatgaagggattgttgaccgggttgttgacggcgataccattcatctcaaatctccggtgcttggaacgacaaaaatccggtttgtaaatgtagatacacctgaaacatatcacacaccaaaaaatgacgcagatgaaaatcaattaagatttggcaaaaaagcatctgactatctaaaaacggttctgtccccaggtgataaaattactgtcaaggtcgggagtgaagccaaggacagctatggcagactgctcggacaagtcataaccgaatcaggatcaaacgtgaacttagagcttgtaaaaaacggctatgctccgacgtattttatttggccggttgacaatgaagaggattatcagcaatttcaggccgcagtagccgctgcaaaaaaagatcaaaaaggaatttggaatgaaaacgatcccctcatggaaatgccgtttgaattcagagccagagagcaagggaaaggcctgacaagatatgtggggactcgtcgaataaaacatatgtgcagccagctgactggaagaagatagctgtggaaaacagaattttcttcgcttcagcaagtgaagcggagagcgcgggatataaaaaaaggcaaacggcacctcaagaacatgtgccgcttagaattctcagcatgaatgatttgcatggcaaaatcgatcagcaatacgagcttgatcttgatggaaatggaattgcagacggcacgtttggacgcatggattatgccgccgcatatttaaaagaaaaaaaggctgaaaagaaaaactcgctgattgtgcacgcgggagatatgatcggcggaagttctccagtttcctctcttcttcaggatgaaccgactgtagaactgatggaggacatcggatttgatgtcggaaccgtgggaaaccacgaatttgatgaaggcacggatgaactgctgaggatcttaaacggcggtgatcatccgaaaggcacaagcggatataatggacagaactttccccttgtatgtgccaattgtaaaatgaaatcaactggagagccctttttgccggcttatgacatcataaatgtggagggcgtacccgttgcttttatcggggttgtcacacagtcggcagctggcatggttatgcctgaaggaataaaaaatatcgagtttacagatgaagcaacagcggtgaataaggcggccaaagagctgaggaaaaaaggcgtgaaggctatcgcggttctcgcacatatgtcagctgaacaaaacggcaacgccattaccggtgagtctgctgatcttgcaaacaaaacagattctgaaattgacgtgatttttgccgcgcataatcatcaggttgttaacggtgaagtgaatggaaaactgattgttcaagcgtttgaatatggaaaagcgataggtgtcgttgatgtagagatcgataaaacgacaaaagacattgtcaaaaagtccgcggaaatcgtatatgttgatcaaagtaaaatcgaaccggatgtcagcgcgtcagccattttaaagaaatacgaaacaattgcggaaccgattatcagcgaggtagtcggcgaagccgctgttgatatgggaggggggtattcaaatgacggcgatacacctcttggaaacctgattgcggatggtatgagagctgccatgaaaacggattttgctcttatgaatggcggcggcatacgtgaagcgctgaagaagggcccgattacgtggggagatctttacaatattcagccgtttggaaatgtgttaacgaagcttgagattaaaggaaaagatttaagagagattatcaatgctcaaatctcgccggtttttgggcctgactacagcatcagcgggtttacgtatacgtgggataaagaaaccggaaaagcagttgatatgaaaatggcagatggcaccgagatccagcccgatgccacatatacattgaccgtcaacaactttatggcgacggcgacaggagccaaatatcagccaatcggactgctgggaaaaaatccggtgacagggcctgaggatttggaagcgacagttgagtacgtgaagagttttgatgagccaattgcgtatacaaaagagggaagaattaagctcgctgaagccagtgatattgaagaccctgtaacagaagacccgattacggaagagcctggagatgatccggggacggagcatccaatgaaagaggttccagagcctgatgtggatttgcctgatataaaagaaactccgggaacagcaccggttcatcagcttccgccttcagccatttcgagattcaatgaaataccaatcaacaacacaaaaaccgctgatactgctaatagcatcagcacattgccgttacaaaccgagactgcggaaagcgggtctgatcatcagcttccggatacgtcagcgggctactataactttatggtaatcggtgcggcggtgacattgtcaggaacttatctatatgtcagaagaaaaaggagcgcctccagaacgtgaaaaaagttattccactattcatcattgctgccggcctagtgatcgcaggctatggaggctttaaattaatcgatacgaatatgaaaacggaacagacattaaaagaagcaaaactggcggctgaaaagccacaggaacttttggggacgaaaaatagcacagatcaagcaaagaacaaagcatcatttaagcctgagaccggccaagcgagcggcattttggaaataccgaaaatcaatgcagagcttccgatcgtggagggcaccgatgctgatgatttagaaaaaggtgtcgggcattacaaggacagctattatcctgatgaaaacggacaaattgtgctgtcggggcatcgggataccgtgtttcgccggacgggagagctggaaaagggggatcggctccgcattctcctgtcatatggagaattcacatatgaaattgtaaatacaaaaattgtcgataaggatgacacatctattatcacgctccagcatgaaaaggaagagctgattctgacgacctgctatccgttttcatacgtcggaaatgccccgaaacgctatattatatatggaaaacgagtgacttaaaaagccgaggcagtgcctgcggcttttcttcatgaaaaatatgtgcggcaaaggtttttcatatcagcagggaaaggggcttcagcaactatgagctcgtctgttatcgggtgaaccgcttgtactttattggcgtgcagtgcctgcctgtttagcagcttgctcccgcctccgtaaagcgagtctcctgtcaacggatggccgaggctcgccagatgaacacggatttggtgtgttctgcctgtttccagctctaattcaacgagcgacagccgttctttcgcattgctggccattaccttgaaatgagtgacggcagtttgcccgcctggtgaaacccggcgtcttgtcgggtgtgaccggtctctgccgattggtgaattaattgtcccttttttcgtccgtagcttaccttcagcgatggcggtatacgtacgcttcagcgtctttttctctaactgctggtctaagatggcgtgtgccaaacgatgcttggcaaaaacgatagcgccagatgtatcctgatcaagacgatggacgtggcgcaccttacatgtttcgccatttatctgataatgataagcgatcaaattagccagtgtgccggtttgcccatcctcattcggatgcgtcgcgatgccagcgggtttattgacgatgagcatatgattgtcctcatataaaatatcaagctcgccatactccggaatgaccgaagatgcttcactttcctgaagatcaatgaacacacggtctcccttttttacaatcatattgtttaagacggattcgtgattgacctttatctgttgatgggacatccagtcttgtatcactggtttagaagctttgagcgctgttttgagtacggaaaacagccattggccgtcctgtttttcattgatgaggatctcaagccctctgcctttttggttcatgttaaatggctccttttcgaagcggaaggctgctgtttctcataggaaacacttaccttagctttcgcgtttttttctgtgctattcttgagtaagacttaggatattcgatggcaagaaaggtgattgacgtgagaattgtgaacgcagcaactgcagaacaggagagctttatcaaggagctgtctatggagctgatccatgatgtatttcctctttatttctccgaactggacattcagcgctttaaaaagaaaggcgttctgtctttaaataaccattattaccaaggaacattaaaagaagcatttcaaattatggcttgtcttcaaatgatacatattatcctgaccaagccttcgccgcactctgatttgagtgatcaggcgatttttgaaaaaaacagcaagatgctgaatgattttgggatttattttccgtttgctttttctgactttcaaaagaagactaacaaagcctttttcggtcaaagaaggctgatataatcatgcggcaagggcttttctatttttagaaaagctcttttttgtatcagagaaatcatatcataaaacctttcctctaactccctttttaaacggctcgtgtctgaacatactaatgattgaaaggggtgctgacaatgagttcagttaaagatacaatgacaacgcaggtggcaaccgtttctccgaatcaaacgattcaggaagcggcttctctaatgaaacagcataacgtcggggcgatccccgttgtagagcaaggtgttttaaaaggaatgctgactgaccgtgacattgcattaagaactacagctcagggccgtgatggccagacacccgtttcagaagtgatgtcaacagaactcgtatcaggaaaccctaatatgagtctggaagacgcgtcgcagctgatggcccagcaccaaatccgccgccttcctattgtagatcaaaacaatctagtcgggatcgttgcgcttggagacctggcagtcaatcagatgtcgaacgagtctgcgggatcagcgctgacaaacatttctcaccaaaacattcattaataagaaagagcttgcagtgtgcaggctctttcttcacataaaaccttactttttgaaagcagacttgtttcggggtatagtgagtgtatacatatgtctcaattcgtactaaaggagttgtacccagtgattaaagcgttaatttttgattttgacgggcttattctagatacagaaacacacgaatatgaagttcttcaggaaatatttgaagagcacggctcagtgctgccgctatctgtctgggggaaggtcatcggaactgcagcgggtttccggccttttgactatttagaagagcagatcgggaaaaagctgaaccatgaagagctcacacaattgagaagagagcggtttgccaaacgcatggaatcagaaaaagcgagacctggtgtcgaagcgtatttgaatgcggcaaaggatttaggcttaaaaataggccttgcctccagctctgattataaatgggtgtccggccatttgaagcaaatcggcctgtttgatgattttgaagttattcaaacggctgatgatgtggaagaggtgaagccgaatcctgaactctatttattggcggcaaagaacctgggggtatcgccagcggaatgtctcgcgtttgaggattctgtcaatggttcgattgctgcgaaacgtgcaggcatgaagtgtgtcattgtcccgaataaagtaacgggcaccttgatgtttgaagactatgatcacaggcttgaatcaatggcggagatggagctcgccctattgcttgatcatctgaactcacaaaactagaaaggagcgagtaggttgtctgagaaattagatttgacccggtttgaaaagaaaatggttatccgcaatatcgaagagaaagacatcgacaagattatcgatcttcaaaaggactgctttccaggaatggagccttggaagcgggagcatttaatcagccatttggagcattttccagaagggcagttttgtgcagaattcgaaggtgaaattatcggttcgtgctcaagtctcctgattaactttgatgaatatgatgaccgtcatacatggcaggacattacagatgacggttatatcaccaaccataatcctgacggcttgaatatgtatggaattgaagtcatggtggacccgaagtacagacgaatgaagattggccaccgtttgtacgaggcgagaaaggacttagccagacgcttaaacctgaaaagcatcatcataggcggacggattccaaactatcacaaatatgcagaggaaatgacagcgagagagtatgttgaacaggtgacacgccaccaaatttacgatccggttctttcttttcagctgatgaacggctttacccttatgcgaattaacccgaactatctcccggatgatacagcttcgatcaagtatgcgacgctgatggaatggaataatgtggattatctaccgcagcagacaaaacgctattataaatcggcgttccctgttagaatttgtgtgattcaatacgaaatgaagaaaatttattcctttgaggaatttgcgaatcaagtagaatactatgtcgatgttgcttccgacgcaagatctgattttgcggtgttcccggaaattttcacaacccagctgatgtccttccttgaggaacggtcaccgagcttggcggtgcagagaattactgagtatacagaagattacatcagcctgtttactgacttggctgtgaagtataacgtcaacattatcggcggatctcatttcgtcgaagaggaaggcaagatctataatatcgcttacctgttcagacgggacggaacgatcgagaagcaatacaaactccatattacgccgaatgaacgcaaatggtgggggatcagcgcaggagaccaagttcgcgtgtttgatacggactgcgggaaaatcgcgatccagatctgttatgacattgaatttcctgagcttgcccggattgcggctgataaaggagccaaaatcatctttacgccattttgtacagaagaccgtcaaggctatctacgtgtcagatactgttcgcaggctagagcggttgaaaatcaaatttatacggttatctctggaacggtcggaaaccttccgcaaacggaaaacatggatatccaatacgcccagtcaggcatctttgccccgtctgattttgaattcgctcgtgacggcattgtcggcgaaacaaacccgaatattgaaatggtcgtcatcggcgatgttgacctggaaattctcagaagacagcgccaaaacggtacagtgcgccagctaaaagacagacggcgtgatatttatcatattcaatataaaaaataattcccaaaaaacccgcctgaattggcgggttttttaaaacaaaagcggaattgtttaggtgctatctttaaaataaaagtaggtataatggagtttctgtattttcgccatttcctatatcatacagaaatcggctaggcttccattgctattgcaatggctgtccaagttgtttcgagtgcgacctttatcagtacgatgctgagcattgccactttgcctgttttgctttggaagctgcatcctctttcttcttgagaaagaggatattttattatttacgcggtttattgactctgacccggtctggctttatattgaaggcagggaaatcatcaccaagacatcacataaagagaaggtctgtttcaattgaattggcattatagagaacgctaatgaaatggagatgatggggatggaaaacattcagcaaaataagggattaaagcaaaaagatgagcaatttgtgtggcatgccatgaagggagtgcatcaagcggacagcctgatagcccagaaggccgagggggcctgggtaaccgacacagacggacgccgctatttggatgcgatgtccggtttgtggtgcgtcaacattggttacggcagaaaggagcttgcggaggctgcctatgagcaactaaaggagctgccttactacccgttaacgcaaagtcacgcacccgcaattcaactggcggaaaagctgaatgaatggcttggcggcgattatgttatttttttttccaacagcggatcggaagcaaacgaaactgcttttaaaattgcccgccagtaccatctgcaaaacggcgaccacagccgttataaattcatctcaagatatcgggcataccacggcaatacattgggagcgctctcagctaccggacaggcgcagcggaaatataaatacgagcctttgagccaagggttcctgcatgcagctccgccagatatataccggaatcctgatgatgcagacacgcttgaaagcgcaaatgaaatcgaccgcatcatgacatgggaattaagcgaaacgattgccggggtcattatggagcccatcattacaggcggaggcatcctaatgccgccggacggatatatgaagaaggtggaggacatttgccggcgccacggagcccttttgatttgcgatgaagtgatctgcgggtttggacggacaggtgagccgttcgggtttatgcactacggtgtgaagcctgatatcattacgatggcaaagggaatcacaagcgcgtatctgccattgtcagcgactgctgtgaaacgggacattttcgaagcgtatcagggggaagctccttatgaccgtttccgccacgtgaacacgttcggcggaagcccggctgcctgtgctttggcgttgaaaaacctgcaaattatggaggacgaacagctgattcagcgatcccgtgatcttggagcaaagcttttaggtgagcttcaagctctgagagaacacccggcagtcggggatgttagaggaaaagggctgctgatcggaatcgaactcgtcaaagacaaattgactaaagagccggctgatgccgccaaagtaaaccaagtggttgcggcgtgcaaagaaaaagggctgatcatcggcaaaaacggcgatacagtcgccggctacaacaatgtcatccagcttgcgccgccattttgcctgacagaagaggacctttcctttatcgtgaaaacggtgaaagaaagctttcaaacgatataatataaaagtgaattattaaaggagcacatgatgagttttcacaaccagccgatcttaccggctattcgcaatatgaagcaatttgatgagtttttgaacagttcattctcttacggtgttattcttgatattcatctcggccagctgaagggcgtgatcaaagaagcgcaaaagcacggaaagaacatgatggtgcacgtcgatctcattcaagggattaagcatgacgaatacggtgcggaatttatatgtcaggatatcaagcccgctgggattatttccacaagatcgaatgtgattgccaaagcgaagcagaagaaaatttatgccattcagcgcctgtttttgcttgatacaagcgcgatggagaaaagcatggagtttatcggcaagcataagcctgacttcatcgaagtgcttcccggcatcgttccgtcactcattcaggaaataaaagagaaaacagggattcccatctttgccgggggtttcatccgtacggaagaggatgtagagcaggcattgaaagcgggggctgtagctgtcacaacatctaataccaaattgtggaaaaaatatgaaaactttttgacggaaagtgattgacaccgctttcatgcactgatacaattgcactaggttaatacattgtgatggagaactcggagaccacagcagctctttacggcaaatgtttatgcacccgtaaagcggtttgttgtggtttttttattctcttcttctctatcatgctttttaatcgtgactttaggaggaatgtgctatgacagcattttggggagaagtcatcggtacgatgctgcttatcatttttggtgcaggtgtttgtgcaggtgtcaatttaaagaaatcgctttcattccagtctggctggattgttgttgtatttggatggggattgggtgttgccatggcggcatacgcggttggcggcatcagcggtgcccatttgaatccggcgctaacgatagcgcttgcatttgtaggagattttccttggaaagaggttccggtttatattgcggcgcaaatgatcggagcgatcatcggtgcggtgattatttatctgcattacctcccgcactggaagtcaacggatgatcccgctgccaagctgggtgttttctcaacagggcccagcattccgcatacatttgcaaacgttttaagcgaagtgattgggacatttgtccttgtacttggaatcttggccattggggcaaatcaatttacagaaggacttaatcctttaatcgtcggtttcctcattgtagcaatcggtatttctctgggaggaaccaccggctatgctatcaatcctgcacgtgacttaggtccgcggatagcccacgcttttcttccgattccggggaagggctcatcaaactggaaatacgcatgggttccggtagtcggcccgattttaggcggatcattcggcggcgtattttacaacgctgcatttaaagggcacatcacaagcagcttctggattgtaagcgttatattggttgtggtattgttaggactctatgtttatacgaaatcacattctgctaaaacattatcaaattcaaaatatatttaatcaaaggggagacatcttatggaaacgtacattttatccttagatcaggggacgacaagttcaagagcgattctgtttaataaagaaggcaaaatcgttcactctgctcaaaaggaatttacacaatacttcccgcatcctggctgggttgagcataatgccaatgaaatttggggctctgtcctcgcggttatcgcctcagtcatctctgaatcaggaatcagcgcttctcaaattgccggcatcggcatcacgaaccagcgcgagacgacggttgtgtgggataaagatacaggaagtcctgtctataatgcaatcgtttggcagtccagacagacgtccggcatttgtgaggaacttcgtgaaaaaggatataatgataaattcagagaaaaaactgggcttttaatcgatccatacttctccggcacgaaggtgaagtggattttagacaatgtggaaggcgcaagagaaaaagcggaaaaaggcgagctgctgtttggaacgattgatacgtggctcatttggaaaatgtcaggcggaaaagcgcatgtgaccgattactccaatgcctcaagaacactgatgtttaatatttacgatttaaaatgggacgatgaactgctcgacattctaggcgtaccgaaatccatgctccctgaagtgaagccgtcctctcatgtgtatgcggagactgttgattatcacttcttcggaaaaaatatcccgattgctggagcggcaggcgaccagcagtccgcattgttcggccaggcatgctttgaagaaggcatggggaaaaacacatacggcacaggatgtttcatgctgatgaataccggggaaaaagcaattaagtccgaacatgggcttttgacaacaatcgcttggggcattgacggaaaagtgaactatgcgttagaaggaagcatttttgtcgcaggctctgccatccagtggcttagagacggattgagaatgttccaggactcttcgcttagcgaatcttatgcagagaaagtggattcaactgacggcgtatatgtcgttccggcctttgtcggactgggaacgccttactgggacagcgatgtgcgcggttcggttttcggcctgacaagagggacaacaaaagagcactttatccgtgcgacactggagtcattggcttatcagaccaaagatgtgcttgacgcaatggaagcagattcaaacatttcattaaagacgcttcgtgtagacggaggagctgtgaaaaacaatttcctaatgcagttccaaggagacctgttgaatgttcctgtggagcgcccggaaattaatgaaacgactgcacttggcgcggcttatttggcgggtatcgctgtgggattctggaaggaccgttctgaaatcgcgaaccagtggaatctggataaacggtttgagcctgaattagaagaagaaaaacgaaatgagctgtataaaggctggcaaaaagccgtgaaagcagctatggcttttaaataaagtaatactatggtataatggttacaagttaataagaacggtcctgagatgaggagagaccacagcaccaaagtgtaagcatgcactttggctgttgtggtctctttttctatttaccgtgacaacaaggaggagacgtaatgatgaaacatcaattttcaagtcttgaaagagatcgcatgctgacagacatgacgaaaaaaacatatgacctatttattatcggaggaggaattacaggagccggaacagctcttgacgcggcatcaaggggaatgaaggtcgcactaagcgaaatgcaggactttgcggcgggaacatcaagccgatcaacgaagctggtacatggcggcttgcgctatttaaaacaatttgaagtgaaaatggtcgctgaggtaggaaaagagcgggcgattgtgtatgaaaacggcccgcatgtcactacaccggaatggatgctgcttccgtttcataaaggcggcacattcggttcatttacaacatcaatcgggttaagggtttatgacttccttgcaggtgtgaaaaagtcagaacgaagaagcatgctttcagcaaaagaaacgctgcaaaaagaacctttggtaaaaaaagacggcttaaaaggcggcgggtactatgtggaataccgcactgacgatgcgagactgaccatcgaagtcatgaaggaagcggtgaaattcggggcagagcctgtgaattactccaaagtgaaggagcttctttacgaaaaaggcaaagccgtcggcgtattaattgaagatgtgctgacaaagaaagaatataaagtgtatgcgaaaaaaattgtcaatgctacaggcccttgggtcgatcagctcagagaaaaagaccattcgaaaaacggaaagcacttgcagcatacaaaaggcattcaccttgtatttgaccagtctgtctttccgctgaaacaggctgtatatttcgatacacctgatggccggatggtatttgcgattcctcgtgaaggcaaaacatacgtgggaacaacagacactgtttacaaagaggcgctggagcatccgcggatgacaacggaggatcgtgattatgtcatcaaatcaatcaattacatgttcccggaactgaatatcactgcgaatgacatcgaatccagctgggcggggctgcgtccgctgattcatgaagaaggcaaagatccttctgaaatttcacggaaagacgagatttggacatctgactcaggcctgatcaccattgccggcggaaaactgactggatacagaaaaatggcggagcacatcgttgatcttgtccgtgatcgcttaaaagaagagggcgaaaaggattttggaccatgtaaaacgaaaaacatgccaatctctggcgggcacgtcggcggttcgaaaaatcttatgtccttcgttaccgcgaaaacaaaagaaggaattgcagccggtttatcagaaaaagacgcaaaacagctggcgatcagatacggctctaacgtagatcgcgtctttgaccgggtagaagcgctgaaagatgaggccgcgaaacgcaacattccggttcatattcttgctgaggcagaatacagtatagaagaagagatgactgcaactcctgctgacttctttgtccgcagaacgggacgtttattttttgatatcaattgggtaagaacatataaagatgccgttattgattttatgagcgagcgattccaatgggatgagcaggcgaaaaacaaacatacagaaaacctcaacaagcttttacacgatgcggtcgtaccgcttgagcaataaatcataacgggctgtctgcagcccgttatttctttttacgtggaaagggccagatctcaggttatcaagtgacagaggcacccgcttcatataaaataatggcataagctgatacataggaggacgaatatgacttggagaaagagctatgaacgctggaaacagacagaacatttagatccggaattaaaagagcgccttattgaattagagggagatgaacaggcccttgaggactgtttctataaagaccttgaattcggtaccggcggaatgcgcggggaaatcggcgccgggacaaatcggatgaatatttacactgtgcgcaaagcatcggccgggtttgcggcatacatctcgaagcaaggtgaggaagcgaaaaaacggggcgttgtcattgcttatgattcccgccataaatctccggagttcgcgatggaagcggcaaaaacacttgcgacacaaggcatccaaacatacgtgtttgatgagcttcgcccgacgccagagctgtcattcgctgtcagacagctgaacgcttatgggggaattgtagtaacggcaagccataacccgcctgaatataacggctacaaagtatacggggatgatggcggccagctgcctccaaaggaagcggacatcgtcattgagcaggtaaacgcgattgaaaatgagctgacgatcacagtggacgaagaaaataagttaaaagaaaaaggcttaatcaaaatcatcggtgaagatattgataaagtttatacagaaaaactgacgtccatttctgtacatcctgaattatcggaagaagtagatgtaaaggttgttttcacaccgctgcatggaactgcaaataaaccggtcagacgcggacttgaagcactcggctacaaaaatgtaacggttgtcaaagaacaggaactgccggattcaaacttctccactgttacatcgccaaacccggaagagcatgcggcattcgaatatgccattaagcttggggaggagcagaatgcagatattctcatcgcgacagatcctgatgctgaccgcctcggcatcgcggtgaaaaacgatcaaggcaaatatacagtgctgacaggaaaccaaaccggagcgctgctgcttcattacctgctttctgaaaagaaaaaacaaggcatcctgcctgataacggtgttgttctcaaaacgatcgtcacaagcgaaatcggccgtgctgtagcttcttcattcggccttgatacgattgatacgctgacaggctttaagtttatcggtgaaaagattaaggaatacgaggcatcaggccagtataccttccaattcggttatgaagagagctacggttatttaatcggggattttgcccgcgataaggacgccattcaggctgcgcttttggcagttgaagtttgcgcgttctataaaaaacagggaatgtctttgtatgaggcgctcatcaatctctttaacgagtatggtttttatcgtgaagggctgaaatccctgacgctgaaaggcaaacaaggagcagagcaaattgaagcgattcttgcttccttcagacaaaatccgccgcagaaaatggcggacaaacaggttgtcacagcagaagattacgcagtaagcaaacggacgcttctgactgaaagcaaagaagaagccatcgacttgccaaaatcaaatgtattgaaatacttcctggaagacgggtcttggttctgtcttcgtccttcaggaactgagccgaaggtgaaattttatttcgccgtaaaagggtcatctttggaagacagtgaacagcgtcttgcctccctttctgaagatgtaatgaagacggtggatgaaattgttgagtcaacagcaaaataattcaagtatgagctgggtcattgtaaatgatccggctttttctttttctcatccaaaagtctgaaagaaaatcatcctacaagtgaagcaatgaaatacaaaaaactggtataatcttaaatacaagatcaatgccggagtgagaaacgtgagcaaaacgaggatggaaaaattaaaaacgctgaaaacgattgcggaaaccttaaatcaagggcacgatatcaaagcaacactggatgaggttttaaaagagttgctgagtctgacaaatcttcaatccggatggatttttctgatcgaagaagatggatcttatacgttagcggccgacgctaatctgcccccggctttaagccgcaaggaaaaagtgctgatgtgcgaaggggagtgttactgcctgacgaaattcaataacggagggcttagaaaggctgcaaatatcatgaactgcaaacgcatcgaatcagcagaaaacctgcattgttttgacacagaagggattacgcatcatgcaactgtgcctttagaagacggggacagaagattcggattgttaaatgtagcggcggccggaaaaaccatgtttgatgaggaagagctgcatttactcgagtctgtcgcctttcagatcggaacggcaatccagcgtatgaggctttctgaatatcaacaaaaaaatgctcttttaatggagcgtaaccgcctcgctcaggagcttcacgattcagtcaatcaaatgctgttttccgtcagtttaactgccaaagctgcgaagacactaacaaaagatgagaatttacagcagatgattgaattcatccaaaacctatcacaggacgcgctcgcagaaatgaaagcgttaatttggcagcttcgccccggaggattggaaaaagggctggctgaagccattaaaagctatggtgcactcattggattgaagatcatttttacacaaaaaggctgtcctgttctgactgatgagcatgagcatatgctatggcgtgtcgtacaggaagctttaaataactgcaaaaagcatgccggaacggatacggcgtatgttagtctgactgcttctttgtgccatgcggagctggatatcatcgatcatggggcaggatttcgctatgaagcgcataccggtctgccttcacttggcatcaagggtatgaaagaacgagcggaaaaagccggagctaagttttggattgagtcagcgcttggaactggaacaaagctgtccatcaggcttccgctaacaagccgaaaaggaggggcggtatgaaaattgtcattgctgatgatcatcatgttgtcagaaagggtctgcgttttttctttgccacccaggatgatattgaagttgtcggagaagctgcaactggaatagaagctctccgtgtcatcgaagagacaaagccggatcttgtgctaatggatctgtctatgcccgagatggacggcattcaagccattaaaaaagcaatacagcaatttccggagacgaatatcattgtgctgacgagctactctgatcaggagcacgtcatccccgcgcttcaggcaggcgcgaaggcgtatcaattaaaggatacggagcccgaggaattggtgaaaacactaagacaagtgcatgctggcgaatacaagctttctacagctattatgtcccatgtgctgacacatatgaaaaatcagcacgacccggaaaaagaaaaatactatcaattaacaagaagggaaaaagacgttctgactgaaatagcgaacgggaaaagcaataaagaaatcgcagcatccttgtttatttcagaaaaaacagtaaaaacccatgtatcgaatcttttagcaaaacttgaagtggccgatcgcacgcaagcagcgcttttcgcagtgaaatataacctgaatggagagatcttaaaatgaacatgttagtcataaatggcacgcctagaaaacatggcagaacaagaattgcagcttcctatattgcagctctgtatcacacggatttgattgatctaagcgagtttgtattgccggtttttaacggtgaagcggatcaatctgaactgttgaaggtacaggagcttaagcaacgcgttacgaaagcggatgcgattgtattattatcgcctgaatatcacagcggcatgagcggcgctttaaaaaatgccttggattttctaagcagcgaacaattcaaatataagcccgttgcattattggcagtagcgggaggcggaaaaggcggcatcaatgcgctgaacaatatgagaactgtgatgcggggtgtctacgccaatgtcattccgaagcagctggtgcttgatccggtgcatattgatgttgaaaatgctacagtggctgaaaacattaaggaaagcataaaagagcttgtcgaagaactcagcatgttcgcaaaagcaggaaatcccggcgtttaaacgccgggatttgtttatgtgagaagggctatttgatcttcataagtcagctctgtggcatgatcaatataacggagaagggaatacagcatcttttctaaaacggcgtaatcctgttcaaaatgatatgcatgcagaaaatgctcaattcgttttgataacaaatcgtcctctgtacgcaccattaaaattaataaattatcccattgagaacgatgggtgtaataaagcgctttatcgtaatcggcataatccatgaatcgcttctcctttcttgggtgagaagttcatgattagtttatgccgcatcctctgttattgacggggcaaaacttgccgtctgcgtaagtaaaggggtagcaatatgagggagacataaaatcaaaatgcctgaatgaagatatcgcttttggtaaacctatgagggaacatattctgggtacaggagactgaaaaaatgaaatccctgccgtataccatcgcgcttcttttttgcggattgattatcgtgtcaatggctgcaaaaggtcattcaacggacacagacgagtccgttcaaaagtgggaacagcttgcctggagcaaaattcaggatgaatataagggcgcttcattttctgattatgcttatatggggcgtacagaggtgaatgatcagcagacgaaagatgtctttcgggtgacagtcagacagaaagatgacactttttctgttcgggccgaagtctattttcatccggtgacaaatcatatgatcagcatcaacgtctttaggctctaataaaaaactgtacagccgttaaggccgcacagtttctgtttttagaaatatcgttttgcaccgagatagcgctgtttccagtaagagttgttcatattggaaatgacaactccggaatcgttggcatttatgaattccccgttgcctaggtaaattccgacgtgggaagggccggctttatatgttgtaaagaaaacaaaatctccgacagcaggctggctaactgatttcattgtgttccaatatcccgctgccgttaatctagatacggatgtgactttattcagtacatagtaaatgaatccgctgcagtcaaacccggacggtgtcgtgcctccccagcgatacggaaccccaagctgcgctttagcggccgaaatcattgtgttaatcttcgcactcgttgagctggtgttgtttgaagaaccggatgaagacgatgatgaagcttttccggaaatgaccagcttttggccaacctgcaagacatccgtttttaaattgtttttctcacgaatctgctgagctgttactttaaatttttgagcaatcacccacaaggaatcaccgcttttcactgtgtatgtagtcgtcgtgcctgagcttgcatttgacgaagaagacgacgatgatgaagagcctgaagatgctttacctgtcagcttcaatacttgtccaacgtacagcacatctgatttcagattgttgatatttcggatttgctgtacagacaggttatagttgtttgcgattttccaaagtgaatcaccgcttttaacggtatatttagttgttgctgaagtttggttcgatttggatgaagtgtctttagaagacgtatcagagccgcttgattttgttttcaacacctgattcacgtaaatggtgtctgattttaagttgttcaagaccttcaattcagcgatggacatattgactttgtttgcaattttccagagtgaatctccaagctgcaccttatatgttcccgtagaagatgaggaacttgaactcttattagaactgctttttgaactggagcttgaactcttattggaactgctttttgtactggaacttgaagaaacagtaccggacacctttaatttctgcccagcacgaattaaatcgctgcttagtccgtttaattttttcagttcctgcaccgtcattttaaactcatttgcgatcagccaaagtgaatctccgcttttcactgtgtaaacagaacttccgctcttcttggttgttgagcttgaagtagatgaagaagtgctggatttgctgcctggaatagtaagcgtctggccgatcgacagaacagtagtcgaaagatgattggcggatgtgagggccgccacacttgtgttataggtttgggccagtttccataaagaatctccgcttttgaccttaatcgttgctgcttcagctggtgtcactactaaagttgtgccgacaatcgcagatgctgtcagccctgctgctaatttctttttcatcttagctctcctttttcccccaatgattttgcatttgctgtttcttttttatatcggcacatttgtctcatcgttttgcctttttataaaaatagccaaattatcttaacaataagggggaaaaagggcataaaaaagaaggaatcttgatctattccttcatttttaaaagcttcatgatatcttctttgtttttgacgaggtcgcgcagtgtgtatttgtctaaaactgcgaggtaggccaaaagcgcttcattcagcacatgttttaagccgcaaaccggggaaataacacagagattcttattcgcatcaaaacattcaacaatattaaaatcgtcctccgtttttctgacaacctcaccgatgttgatgtcttcaggttccatgcctaatcgtatgccgccgccccgtccgcgtatcgtttctacgtagccgagctggccgagcctgtatatgactttcatgagatgattttttgaaatagaatacgtttcggcaatctgttttatatttgaaagttctccgggacgctctgcagccagaaaaatcaacactcttaatgaataatctgtataattggttaacttcataataagacctcagaataagacattttctatatcttatcataatcgattgaaaaatgaaaaaaaaggaattaaaaaaacatgcacccagctgggtgcatgttttttgcttacatgtcattcggcggattttggttttttcggtttttttcgatttctgtgttttgcattttgcgttcaaatgtagacagataacgtgatgcaaaatccttaccgccaaggccgaaggataaaccgaaagcgagtgcgaagccgctaagaacgatgatgaacgcggaattgacgattgtcgcagcgacaccaagctgatccagggccataaagaaagcaagtgcgataatcgtatatttagcaataggcgctaaagacttgaattcctggccttttatcatgcttgcgagcacttttctcaccaattctcctgcgtaaaggccgagtccgagaatgaatactgcgacaaggacattcggcagatacgcgatgatgccagtggcaatttctacgaggaagtgcagccgaacaatttgaagagcctcagctgtaaagagcagaatgacaatgatttgcgcaatcataccgacaacttgagacaaggacagctttgcaggcgttccggcttccatgcccattttccctaagacagaatcaaagcctgcgcgatggagcagtccggacaccatggatttcacccattttcctgcccagatacctgctaaaacaagcacgatggcaatcatgatgttcggaagcatgtttaaaatcgtattcagcatagagacagccggttttgaaatgccggagacatccagctgatcaagcgctgaaatgaccaccggaatcataatcagcacataagcgattgttccgatgactgctgaaaggcttgtatcttttaagtaaattgataaacccatacgtgccgcgaatctttccgtgccgatgcttgcaaggaaattcgtaatgatatcacgaacaaggcgggcaacaagccagccgattaatacgataagcgccgctgcaaataatttcggcagaaaagcgagcacgctttccatcatatttgtaaaaggacctgaaatgccgctgattttcaaagaagataagacccctggcagaaaaacaagcagcacgagataaaagacaatttgtgaagcggtattgacagcctggtgaatatcttttccttcagacaccaaattccacttgcgcagtttgtcactcgtgttcagcttcatcccgatttttttgacaaggaagctcaaaacagaggctgcagcccatcctaacagcagaatgagtccggctttcagcacgcttgggatcgcggctgcaatcgccgaaagcatactgacaaacggcgatgccactgttgtcaggtgcaaaatgttaaagaataaaataaagacgatgatcagtgcgataaaataaacgaccttgcttatgactttttccgaggaatagcgtgaaggctttttcccagcaaagagcttgtcgtcaatttttgttttgctgagtcctttgtataccgctttttcaatgattttagcaatagcccatccgattaataagacgagtaaagcaatgattacgtttggcagcttactgagataagaagaaagcacgtctgctacattcaattggtatcgctcctttttcgtagtatggtgtgtgtttacccactgatccaataagaaaacagatgaatgtgccgggggaattttttcttgcccgagtgagactatcatcttttgtctggcgggctcatacattatagataagtccaagtaggggggattcggttgaacgcggaggagaagaagggattacagcgggcaattgaggaaattaccgaaattgcaaaaggattcggccttgatttctacccgatgagatatgaaatctgcccggctgaaattatttatacatttggcgcgtacgggatgccgacaagattcagccactggagcttcggcaagcagtttcacaagatgaagctgcactatgatctagggttaagtaagatctatgagctggtcattaactcagatccatgctatgcttttttgctggacagcaactcactgatccaaaataaattgattgtcgcacacgttcttgcccattgcgatttcttcaaaaacaactgccgtttccaaaacacgaagcgcgatatggtggaaagcatggcggcaacagctgaacggataaaacactatgaacaggttcacgggataaaagaagtcgaatcttttttagatgcgatcctttcgattcaggagcatatcgatccgtcgttggtccgaccaaagctccaatggagtgtggatgatgaggaagaggagattgaagaggcagccacgccttacgatgatctatggtctttggatgaaaagaaaccgaaaaaacaagtgaaaaaatcgaaaaaaccgttcccgccgcggcctgaaaaagatatcctgctttttatcgaggagcattcccgggagctggagccatggcagcgtgatatattaacgatgatgagagaggaaatgctttatttctggcctcagctggaaaccaagattatgaatgagggctgggcttcctattggcaccagcgaattatacgtgagcttgatttaacctctgatgaagcgatcgagttcgccaagctgaatgcaggtgtcgttcagccgtccaaaacaggcattaatccttattatttagggctaaaaatatttgaagacattgaaaagaggtacaacaacccgacggaggaaatgaagaaaatgggcgtgcagcctgactccggccgggagaaaatgtttgaggtcagggagattgaatccgatatctctttcatccgcaattatttaaccaaagaattagtcatgcgcgaggatctttatttgtttcaaaaacagggccgagattataaaatcatcgataaacagtggaagtcggtgcgcgaccagctcgtaagcatgcgggtaaatggcggttttccatatttgacagtaaacgacggcgattatatgaaaaataacgagctctatattaagcattggtatgaaggaatagagttagatttgaaatatttggagaaagtgctcccttatttattccagctttggggaagaagcgtgcacattgagtctgtgcttgaggataaggaagtcatgttttcctacgacggaaaaggtgttcaccgcagatatttataaaaaagaggatgcagcgttctgcatcctttttattttccagtttttaaaatcttaaatatgatgtttgcctggtccgtattgttaatcaatccgcggaatttttcttttccggggccgtacgcgtataccggtacttcttcgccggtatgatcggtactcgtccatccgctgttggagcgagtattaaaaatcttgatgatggctttgtaggcccctttgcttttgtcagcctgtgcagctgcttcaacgcttttgatttcttcagatgtgaatttcagattggcatagcgggcgagcacatctttaaccggcttgccttcactgatttttttggccatgaattcaggtgttttcttagcggagagaatcggttctgcgtgccaattcttttccccgtttgcgccaatggtaaagccgccggttgtatggtcagcagttgcaatcacaagtgtatgtttgtcttttttcgcaaattcaatcgcggctttataggcctgttcaaaatctttaacctcgctcatagctcctactgtatcattgtcatgggccgcccagtcaatctggctcccttcgaccatcaagaaaaatccttttttattttggttcaggcgatcaattgctgaaacagtcatttctttgagagacggtgttttgctgtcacggtcgagcgccttagcaagccctccatctgcgaaaagcccgagcacctgctgatctttatttttcttcaatgcttgtttagttgtcacatagctgtagccggcttgtttgaattcctttgtcaagtttctgtccttgcggttaaaataagattttccgccgccaagcaaaacgtctattttatgtttgccttttattttgtcatccatatagctgttggcgatttcgtccatgtttttccgtgattcattgtgggcgccatatgcggctggagtggcgtggttaatttcagacgtggcgacaagccctgttgacttgccttgctgtttggcctcttcaagtactgatttcacttttttcccgtttttatcgacgccaattgcattgttatatgtcttaacgcctgtcgctaatgctgttccggctgctgctgaatctgtaatattatagtcagggtcatccggatgcgtcatcatcatgcctgtcaggttccggtcaaattctgttaacttcgggttattcggtgtgtcaccgttatttttcatggaacggtaggctcttatgtaaggcgtccccatgccatcgcctatcatcacaatgacatttctgatctcagctttgttttgttttttggcgctggccttttctgtttgctgcagctcagctccggcaaagattccagctgtaaggacagaaacagcggcgattggcagaaattttgatttcatattttgaaacaaattcattttttcatgcctcctttaatgtattccgtttatcacgttagggaaattttgttaaatgcggctgctgatcatgtaaacaataagtaaagccttgtaaggaaaatgaaaaaacgcttttcgttatcttgccttatttgatgtaaagcattcatttttcagaaaaatctttacctctctgtctttgcatgatatgtttgtttaaataaaaaaactgcggataaccgcagctctcctcgaatattctttatcactcatttttccggtatgtgagccgaccccgaaagtttttcatttatttcctttatgttgaaaaacatcccataaaacatgacaaaagcactcgttttttgtcacctttgcaacgaaaatgaaatatttaatacccttaaaaacttttttttagaacgaataattaagaaatttgtcacatgaagtcaagactatttctgatgggaatctatccttataatagaaatcaataagattaattaaaaaaagagatacatatatagagagttaacatttggggaggaaaatatgaaaaagcaaatcattacagctacgacagcagttgttttaggatcgacgttatttgcaggagcggcatctgcacaaagcattaaggtgaaaaaaggcgacacgttatgggatctttcaagaaaatacgacacaacgatcagtaaaattaaatcagagaaccaccttcgttcagacattatttatgtgggacaaactttatcgattaacggcaaatctacaagttcaaaaagcagcagttcttcttcctcttcttctacatacaaagtaaagagcggggacagcctttggaaaatttcaaaaaaatacggcatgacaatcaatgaactgaagaagctgaatggcttaaaatcagatttgcttcgtgttggacaagtcctgaaactgaaaggttcaactagttcaagcagctccagctcatcaaaagtgtcatcgtcttcaacttctacttataaagtgaagagcggagacagtctttctaaaattgcgagcaaatacggcactacggttagcaaattaaaaagcttaaacggcttaaaatcagatgtaatctatgtcaaccaagtattgaaggtgaaaggaacaagcacaagcagctcaaaacctgcttcatcttcatcatcttcaagcagcaaaacgtcatctacatcacttaatgtgagcaaactggtttctgatgcaaaagcgttagtcggaacgccatataaatggggcggaacgacaacttcaggctttgactgcagcggattcatttggtacgtactgaataaacaaacaagtgtgggcagaacaagcactgcaggatactggagttctatgaagagcattgccagcccgtctgttggtgatttcgtcttcttcacaacatataaatccggcccttctcacatggggatttacattggaaacaatagtttcattcatgcaggatctgacggcgtacaaatcagcagcctgaacaacagctactggaagcctcgttacctcggtgcgaaaagattctaatttttagagaaaacccgttcattggaacgggtttttttcattagacggagcacaggcgttttggttgctcctaaaaatgaaaatgtgataaaaaatccaagaattttttttctttcttattttcataaagggcaatcgcgtaagcgccagcatagggcagctgtacagactgataaggaattctgatcatctgtttctctgctaactcacgctttactgtagataaaggcagaaatgaaactccgagtccttccttgataaaccgtttcgttatatgtgtttgagtgaccttcattgttctcacaaatggaaatgtcattctgacttgacggagcaagtcgtcccagtaatcaggatgattatgggtcaaaagcaggtattgttcgagcacctctttggcatcaatttctttgtcttctatgaaacgcttatcgggcggggcaacaaggacgacagggtctttgtataagcagtggcagcttaaagaagaagactgtacctttaaacagcttagtccgatatctgcttccccggctttaatcagtgacgcgatttccgctgattcgaaaatcgtaaccgccatttctgtttccgtattcattgctgtgtaccgtttcatgacagaaggaagcacagtatctgcaataagcggagaaaccgcgagctgtaaggtttgagagtagccttgtctcactctgtgaagctctgccatgctgttttcataatcatcaagaagcctgagcgcatacggcaaatacgccctgccttcatcagtcagctggatttgcctgcctttacgctcgaacagcttgcagctgatttctttttctaattgcttgatatgtacggtcacagtaggctgagataagtaaagcgtttccgccgtttttcggaagttctcatattttgcagcggtcacaaaggtgtgaagccatttgaaatccatttctattctccctctgattaatatttttaattaattccctttaaaatattcattattttttaaatattatatttactataataacagaaaaggatagggggaattcaaatggtacattacggattaaagggaattacatgtgtggaaacatccatcagccatattgatggtgaaaaagggcgtctgatttacagaggacatcatgcaaaagacatcgcactgaatcacagctttgaagaagcggcttatttgattttatttggaaaactgccttcaactgaagaattgcaggtatttaaagataagctggctgcggaacggaatcttccggaacatattgagcgcttgattcaatcactgccaaacaacatggacgatatgtcggtgctgagaacggttgtttcagcattgggggaaaatacgtacacattccatccgaaaacagaggaagcaatccggctgattgctatcacgccttccatcattgcatacagaaaaagatggacgcgcggtgaacaagcaattgcaccttcttcccagtacggacatgtcgaaaactactattatatgctcacaggcgaacagccttcagaggcaaaaaagaaagcgcttgaaacctatatgattctggccatggagcacggcatgaacgcatcgactttttcggcacgagtcacgttatcaacagagagtgatttagtgtcagccgtcacggctgctctcggcacgatgaaaggtccgctgcacggaggcgctccttctgcggtgacaaaaatgcttgaagacattggagaaaaggaacatgctgaagcatatctgaaagaaaaactcgaaaaaggagagcgcttgatgggattcggccacagggtgtacaaaacaaaagacccgcgggcagaagctttgagacagaaagcagaagaggtggccggcaatgaccgtgatcttgatcttgcgctgcatgtagaagcagaagcgattcgtttgctagaaatctacaaaccgggacgaaagctgtacacaaatgttgaattttacgcggctgcagtgatgaaggccatcgattttgacgatgaattgtttactccgaccttttcagcaagccgaatggtagggtggtgcgcccatgtactggaacaggcagaaaacaacatgattttccgcccgtcagcgcaatataccggtgccattcccgaggaaattctttcataacatattttggcgtttattcatttctgtcgtgtggtaacgttcagtatcaaccacatgtctaggagtgatgaatggtgaacccaatggacagacaaacagaaggacaagaaccgcagcatcaggacagacagccgggcattgagtcaaaaatgaatccgctgccgctgtcagaggacgaggattatcgaggaagcggaaaactgaaaggaaaagttgcgatcattactggaggcgacagcggaatagggagagcagcagctattgcctttgctaaagagggggctgatatctccattctatacttagacgagcattcggacgcagaggaaacacgtaaacggatcgaaaaggagaatgtccgctgcctgcttatcccgggagatgttggggacgagaaccattgtgaacaagctgtgcagcaaacagtggaccattttggtaaactcgatatcttagtgaacaacgccgctgaacagcatccccaggacagcattctcaatatttcaacagaacagctggaaaaaacctttcgcacaaatattttttccatgtttcatatgacgaagaaagctttgcctcacctgcaagaggggagtgccattattaatacgacatcgattaccgcttatgaaggggatacggcgttaattgattattccagcacaaagggtgcgattgtttcctttacgcgttccatggcgaagtcgcttgcagataaaggcatcagagtgaatgcggtggcgcccggtccgatttggacaccgcttattccggcgacattccctgaggaaaaagtgaaacagcacggcttggataccccaatgggaagaccgggacagccggttgagcatgcaggcgcctatgttctgctggcgtctgacgaatcttcctatatgacagggcagaccattcatgtgaatggcggccgttttatttcaacgtgatcaacgaaaaaccagctctagagctggtttttttgtgtggtaaaaaatttcaaaataaaaaatttgtcgatttttctaacaattttgttttcatttttgcaattttatatataatattgagtaggagaaaggaatgattcgcgaccagtacaaatatagtagaaaaaaagaaaaatgaccattgttactcatgaattcagaaaattcaaataaaatatataaaaatagatgatcgggagttgaaggggaatgaaagggagcgtttttaggaagaaaagcattcaggatttaatcgctgcgacgagcggggaaaaatctttaaaaagagaattaggggcatttgatttaacgttgcttggaatcggcgccattattggcacagggatttttgttctgacgggaacaggcgcagtcacggcaggtcccgggctgacgatttcatttgttgtggcggcgttggcttgtttattcgccgccctgtcttacgcggaatttgcgtcaagtgtgcctgtttcaggttcggtgtatacattcacttatgcgacattgggagagcttatggcctttattatcgggtgggatttaattttagaatacatgctggcggtaagtgcagtgtcggtcggctggtctggttatttccaatcgtttttatcagggctcggcattcatcttccggttgctttaacagcggcaccgggcgcagtgaaaggcacctttaccctgtttaatcttcctgcattcgtcattgtaatggcgatcacatatttgctttatttaggcatcaaagaatcaaaaagagtcaacaatatcatggttatcttgaagatactggttgttctgctgtttatcgcggtggcagccgtttacgtgaagccgcacaactggcagccgtttatgccaatgggctttggcggcgtattcagtgcagcggcgctcgtattctttgcttttatcggatttgacgctgtatcctctgctgcggaagagacgaaaaatcctgcgaaagatctgcctaaaggcattattttctctttactggtctgcacgattttatatgtcaccgtatcagcgatcatgactggggttattccgtttgctcaatttgcgggtgtggatcatccggtttctctagttcttcaaagcgcaggacaaaactgggtggcaggcatcattgatattggcgccgtgttgggaatgacaacagttatgctcgtgatgctttacgggcagacacgcgtcatgtttgccatgtcgcgtgacggacttgtgccgggttcactttctaaagtgcatccaaagcacaaaacaccttatgtagccacttggtttttcggaacgatgtcggcgcttctcggctcacttgttccgctggatgaacttgcaaagctggtgaacatcgggacgctgtcggcatttgtacttatttctgtggcagttatcgttttgagaaagaaacagccggatcttccgagagcctttaaatgcccgggagttccgtttatcccgggcctggcaattctgttctgcctgttcttgattttaaatctgggatgggtgacgattgtccgcttcctagtgtggctgttaatcggcttggtaatctatttcctgtattcaagaaagcattcaaaattaaatcaataaccttttgataaagagagcggccatacaggccgctctcttttctgttcctggcaaatgaatctatagaaatgaagacaaaaataagagataatataggctggaaaggaagtgacgtttattgtctgagcaaaaaccagtccaatgggcttcgaaaatcggtttcgtcatggcagccgccggctcggctatcggcttgggcgcgatttggaagttcccttacgtagcggggaccaatgggggaggagccttttttcttatcttcgtgttatttaccatcctcttaggctatccgcttttggtgggggaatttatttttggaagacggaaccagacgaatgccattgatgcatataaaaaagaagcgccgcgatcagcttggtttcttacagggtggatcggtgtagccgcgtgtttcttagtgctgtcgttttacagtgtaatcgggggatggattttgctgtatatcgtgaaaacagcgtcaggatcactgtccgggctttctcaagcacagtatggcgctctttttgcttctattatccaaaatccggtgcagacgctcgtggctcagcttgtctttatggtacttactgtcatcgttgtcgcaagaggggttcaaaaagggattgaacgggtaagcgcggtgatgatgccgattttgtttttattgtttattctgctcgttcttcggtctcttacgcttaatggtgcaatggaaggcgtaaagtttctgcttgtgcctcatttcggcgatctgactccggaatccatattattcgcgctgggacaggccttctttacgttaacactgggggtttcggttatggtgacctacagctcctatttgccgaaaacacaaaatatccctcgttcggcagcctccattgtcttgatgaatatcattgtgacactcttggcaggtttggctatttttccggcggttttctcattcggttttcagccaaatgaaggaccgacactgctgtttacagtgcttccggccgtttttgaacagcttccgttcggcacgttgttttttatcggttttctcgttgcatttttatttgcagccttaacctcagcattttcgatggttgaaattatcgttgccacaatcggaaaaggggacgaaaagaagagaaaaaaactgtcatggacgagcgggcttttgatctttttggtcggaatcccatgctgcttgtcttatggcgttttgagtgatgtgcacctatttggcaaaacgttttttgatattgccgattttaccgtcagcaatgttttgatgccttcaggcgctctgttaatttctctatttatcccgctgaaaatttcgaaaagcgaactcttggctgaaatgcgaaatggatcaaatgcaggtaaagcattcttttacacgtggttttatttgcttcgttttatcgtgccgcttgccattattatcgtgttcttaaatttaatcggaattttatcattttaaaaaaacaggctccgtttccggggcctgttttttatttaataagatgatatcaacggtgcccatgccgttttcagtttttggatgccgagcctgatgtcctcttctgacaaaccgccataaccgattaagacagaagcaaaaggcgtctgttctttatatgagggagacacgggatagatggttacaccgtggtctgcggctgcttgtattgcttcttcctcacttgctggaaacaaaaggcgcagcaggatgtgaagccccgagttcttaccgagaatctcaacggtgtttcccagttcagagcggatggcttctaacaggacagcgtgtttttttcggtataagcttctcattctatttatgtgtttttgccactctccggtttcgatgaagtctgccagtgccaattgtgagtgggcagaaacggtctgcttcattaactgagcattgtttttgatcggttccatgagttcatggggcacaatcatgaagctgagccgcaaggaaggcagaagtgactttgaaaaagtgcccagatatatgactctgccattcggatcaagactctgtaaagacggaatgggatggccgctgtagcgaaattctccatcgtaatcatcttctataatgaatgaatttgtttctgccgcccatgccagcagctcctgtctgcgggtaatcgtcataatggtcccaatcggaaactgatgcgaaggagtcgtatacatgagataaggattctgacggtagagctcatccggcaggacgccttctgcatcagaacaaatcggagtgacatccatgtgatttgcttcaaacatccttcttgaacggtgaaagcccggttcttcaaagccgatttttgtacctggctttagcgaaaggcaaagaatttgcagaagcacggtggttcctgcgccgatgataatctggccgggttcacaatttactccccgagacagcctgacgaatcgggcaatcatgtgcctgagttcgtattctccttgagggtcgccagaggtgtgaaacgatccggaatagcgatcaagactttttactatgctttttctccatgcgttaaagggaaagagggtcgggtcaacgctgccctgatggaagtcaatagcaggtgcgttcttttcatgtaatcccggctgtacagactgctgaaaatggtcaggagctgtcgggaatcctggttctacttccgccgcgaaccagccgatttttggcttgcttttgacatagccctcagcagttaattgctcataagctcgttctatagttgccgtgctgacatcgagcaagctggagagcctgcgttttgacggaagtcttgttccctttgtgattcgcgcatgtgaaatttctagtttaaaaaaggtataaagctgctcatacagcggtgttttgctctttttatcaagaaacggcgtgatatccatctcgtgtctcctttttatctggcatggttattttttctgatattggctatttggcaaatgccatttattagctatgatcattgtaacgaaaggaaaggggattgagaagatgatccatatgaaacaattaacctcgaaagaagaatgggctgagtcgtatccgattatgagtgaattgagaacagaactggatatagagacgtatttacaaaggcttgaagcctgtgtgcagaaagaatcgtatatgctgtttgccttatatgaaaatacagcaatcagagcgctgtgcggggctctgccgagagtttccattcataaaggagagcacttgtggattgcggatcttgttacaacggcaccttgccgatcaaagggatacggcaaaatgcttttggattatgcctcagactgggcgagaaaagccggacttggttttgtcagtctttcatctggccttcagcgtaaagacgcacatcgattttatacagataaaatgggttttactatagaaagttatttgttccgaaaaccggtataacgaaaaaagacgcctgaaaaggcgtcttttttaaaagccaaactgtaaattcgtatctacagatacaatggtatacacacaaataatcacaaagagattaaggatgacgccgagcaggccggggcctgtgcgccctctcttgatgaagagttcaacaacgccgaacggaacggcagccatggcgaatggaagcatttgataggaataaaacgtgacattgctgataatggccaaattcagcaacagcagggacagaaccgctgtcccgacagagatccagccgaatacattgtgttctttaaaaattcttaccagttccataattccacctcgccgacattcgctgattttacagatttatttttcagcatgcgctggatttccttggttggccctgtaacgaccgaaccgtatacattgacaccgtttttctctacataatctaatcggttatctacattcaggtctttccgttttgaaatgacctgagcccatttttcgtgtttggacatgaattttagggcgttgataaactgatcgccattcgacttgccttttgtattaagggcggccaagaactttgaatcctttccaggatagccaagaggttctgtggaagctgtcttatttgtgtttttctctgtttcgattgcgttccacaaaaagctcacatcatagcctttgaatttgttatacacgtcttttgtcggatatgcacggtcatatgaaaggtagacctctgataccgttccttcaggcaatgtgcttaacgttttttctgcttttgcggtcgtttgttcagacttgtttgaaggatgtgtaaagtaatgtccggttttattcacttctaagtcatagtagtttactgccggcgcttttactttgttataaaacatttcaacccgttcattccctacggcagccgtcttcgtgccaatctgcttttgcagcgggaattccgtattcattccaaatagcttcacttggcttttcagtccggaagtatcaacaagaacattcggcatggtcagggctacagtgactgcggcagtttccataaactcattgccggtgctgtgtttcccacccattccgtaatagaggtagcttcccagcgtacaaagcggcaaaatcatcaatgtcgaaatgacggcaagcacagaaattcgcaaataagacttgcgtttgccgtaggctaaaatcgctttttgtttttcaggactgatgctgagatcccaatcgttatcgtcctctagttcgctgtcaatcagttcctgatatacttcgagcttctcaagttcttcctcaaatgcagtcatttcctggtcgctcatttccccatttttatattgatcaaaacgctttttaaattcttcattcatcattaacacctctattataaagtgctttcagccgctgtctggcacgaaataaaacacttttaaaattcgcctctgaaatattcataatatgggatgcttctttgtagtttaactcttttaaataatatagcgttaaggcctcccgataattatcggggagctcggacatataaccagtcagcacttcctttatctctacctgatgggcaggactttgaacagcattttgaaagaggcttccgattaagtcatcagaaatggttacttctttcttatgctttctgacgtaatcaatgaaggcgtttcgcgccacttgaaaaagccagggctttactttgctgtgatcataggagtgaatgtgtatgtatgcccgcataaaggtttcctgcagtaagtcttcagcaagatgcttgtcttttgtcatggagagcaggaacctgtaaacatcattcatgtacatttggtaaatttcatcgatcgtcactgccttttctcccctctatgttatacacgcataagaaaggtttaaagttgcacattacatgcaaacggcttttttatacctaatcaaacaccattactatatagtacccaaaaatggccgcaaaagatagtgcggagaaaggtttaacattttttccagaggggaaaagatagtgaaaaagtgaaggagtggcacaatggaatataccagtatagcagatacaggaatagaagcctccagaatcggcctcggcacatgggccattggcggaacgatgtggggaggcactgatgaaaaaacatcaattgaaacaatccgcgccgctcttgatcaggggattacactgattgacaccgcgccggcttacggcttcgggcagtccgaggaaatcgtcggaaaggcaatcaaagagtacggcaaaagagaccaggtgattctcgcaacgaaaacggctctggactggaagaacaaccagctgttccgccatgcgaacagagcgagaattgtagaggaagttgagaattctttgaagcggcttcaaacagactatattgatctttatcaggtgcattggcccgatccgcttgtgccaattgaagaaacggctgaagtcatgaaggaattatatgatgcgggaaaaatccgggcgattggcgtcagcaatttttcaattgagcaaatggatacatttcgcgccgtcgcacctctccatacgattcagcctccatataatctgtttgaaagagagatggaagagagtgttcttccttatgcgaaagataacaagataacaacattattatacggcagtttatgcagagggctgttaacaggcaaaatgaccgaagaatatacatttgagggcgatgatctgcgtaatcacgatccgaaattccagaagccccgctttaaagagtatctttctgctgtcaatcaattggataagctggcgaagacacgttatggaaaatcagtgattcacttggctgtcagatggatcttagatcagccgggagcggatatcgctctttggggagcaagaaagcctgggcagcttgaggccctatctgagattacaggctggacgctgaacagtgaagatcagaaagatatcaatactatattggaaaatacgatatcagaccctgtcggaccggagtttatggccccgccgaccagagaggaaatataacaaaagctgagggcgaatcctcagctttttggcgttttaacgggagaaatcttaaaaattagtaccaggtaataaaaaatgttgttataatagaagatagaaagaatcattgattacgacaaaggaagtgcgatatgtataagttttgtgcaaatgctttaaaagttattctttctcttcgcggaggagtgaaggtgtataacaaagaaaaccttccggccgattcaggttttgtcatcgcgtgtacacattccggctgggttgatgtgattacactcggagtcgggattcttccttatcaaatacactacatggcgaaaaaagagctttttcaaaataaatggatcggttcgtttctgaagaaaattcatgcctttccggtagatcgggaaaatcccgggccaagcagtattaaaacgccgattaagctgctgaaagaaggagagatcgtcggtatcttcccaagcggaacaagaacctctgaggatgtgcctttgaaaagaggtgcggtgacgattgcgcaaatggggaaagcgccgcttgtccccgctgcatatcagggcccttcaagcggaaaagaattattcaaaaaaggaaaaatgaagctgattatcggtgagcctcttcaccaggctgattttgcccacctgccttcaaaggaaagacttgcagcaatgacagaggctttgaatcagcggattaaagaactagagaataaacttgatcagctataaggcgttctgagagattgccctgaaactgtgaaaataagaaaagcaccttatacaaggtgcttttcttattatgcttcctgctggttagctgtctccagaagttcttcttcttgaagctttttcacttcaatatatgcgacgtggtggccgtcaatttcattaatgatgaattcgcagccctcttcgatgatggaatcatctttttcaacatcgtatttttgagtaaggaaccagccgccgattgtatcgacttcttcgttctctaaatgaatgcctagcaggtcgtttacttggtcaattaacacttttccgtcaagaatataatggccttcgccgattttgcggatttcgctaatttcatcaatatcaaattcgtcgcggatttcaccgacaatttcctcaatgatgtcctcaaccgtcacaagcccggcagtaccgccgtattcatcagacaatatggccatgtggaccctctctttttgcattttgacaagcaggtcttggattggcgcagattcaatgacatgaatgatcgggttgacgaattgagaaatggtggaatcaacagatacctcaccgctgatgcaggcggtcagcacttctttaatgttaataaccccgataatgttatctttatcgccctcttccacagggtagcgggtatatttttcaatctgaatgatgtccatcatttcagaaatcttgatatcatgcggaaggctgacaatttcagtccgcggaatcataatttctttcgcgagcctgtcgtcaaattcaaagattttattcacatatttaaactctgattggttgatttcaccgcttttatagctttcagacaaaatgattcgcagctcttcttctgagtgtgccagttcgttttctgaaacggtctccaggccaaatgctttggtcaataaccgtgcggaattgttcaaaagccaaatgaatgggaacgcgatgcggtaaaaccaaatcagcggtttcgcaaacagcatagacactgcttccgccttttggatagcgactgttttaggtgcaagttctccgacaacaacgtgtaagaacgtgataatggcatacgcaaaaataaacgatatgacatgtgaaagggaacctggaacattcatttggacgaaaagcgggtgaagcagcctttcgatcgttgattcacctaaaacccctaatccgatggaagtcaatgtaattccgagctgacacgcagataaatattcatcaagatgcgtggtcactttttttacggctattgctgctttatttccttccgcgatcagctgatcgatccgtgagcctctgattctgataatggcaaactcagatgccacgaaaaatgccgtcagggcgattaaaacagcaactaaaatcaaattcactatgtccaattagaaccttcactctagcaatgagaatgaaggtaacacctcctgttagataaaatggttttaacttaacagcagcataaatgattggaacacggcgagcttttcaggcgggagtttgcttttcagcttgtcacgatcctcgggcttcagccgttcaaaccgatgcaagattccggagatgttttgattcatatgatcaatttctaatgccagatttccaatttcatcatcaagtttagctgaagagggaaactggttctccagtcgatctttaatatcggacagggccaatcgctgcttcttgcaatctacaataaatataagtcttttgagtgcattttcgtcgtagtaacggtaatttgaacaggatctggccggcgtaagcagaccaagattcgtataataatcaactgtccgtttcgttactccggcgagtgccgctagttcactgatgcgataagtctcagccccatctatatccctcccaaccatcacgttatagttatgagaatagtttaatatatgaatggtgtcttgcacaagtttattgttttttttagaccggaattggaagttgtggaattcatcatctgattgaagtaacataggaagatagaattttcaaacttttatatacggaagggacagatgaaattggctgggttatcccgggaagttgaagaaaacttaaataaaggatcatggattcgcaagctgtttgatgaaggtgcaaggctgaagaaggagttcggggaagaccaggtatttgatttttcactcggcaacccgattattgaaccgcctgaagcttttaagagagcgttaatagaggaagctgaaaaaggcagccacggatacatacaaaaccaagggcttcctgcagcgagagaaaaagtcgcgcaatttttggggtcgcgttttgaagctgatttctcagcggagcgtatcgtcatgacggtgggcgcggggggcgctttgaatgttgcgttaaaaagcatcgtaaaccctggggaagaggtcattattctcgcaccttattttgccgaatataagttgtatattgagaactacgggggaaaagccgtcagctgcccgttgacaagccggtttgagatcgacattgaagcggtaaggcaatcgatcactccacagacgaaag

SEQ ID NO: 2 - DNA, 1000000 bp, Bacillus subtilis
  source 1..1000000: mol_type = genomic DNA; strain = Strain 105 ELA191105 ATCC PTA 126786
ggctgatcctcaatacaccgcataaccccacaggcactgttctcagccagaaaaatatagacgatttaggcgctttattaaaagaaatagaagagaagagcggccagacgatttatgtgctgtttgatgaaccgtacagtcaattaatctatgatgaagagctggcaaatccgtttcaatcgtaccatcgtgtgatattggccagctcattcagtaaagatctcggcatagccggggagcggctcgggtatatcggattggacagccgaatgccggatgcggaccttttgatcaacgcttttgtgtattgtaatcgaacgcttggatttgtgaatgcccctgtcatgatgcagcgggctgtggcacgaatggatgatttaagagtagacgcgagtgtttataaagagcgccgggatttaatggtagacattttaaaagaagccggttttgaatttgaaatgccaaagggaggtttctttgtttttccaaaatcgccgattgaagatgaagttgcattttgcgtgcatgccgcccaaaaatacaaattattaattgtgccgagcagcggttttggaatgagcgggcattttcgattatccttcagtgtgccgatcgagcagattaaaaactcacgggacattttcatttctttatataaagattttgcttaagaaggcaaagaaaagaaaacagttttcaaggctgttttctttttatatccacaaaatccttcctcttccaatccagacaggcgaagaattgacaagcaggcatgcagttaagtctttcttcatgataaaagtctaaaaattaaaaatcatttttggaatgagttgtgttacaataaaatatacaatttataatcaaactttgacttttggaggtggtaagatggggccctctgcttaggcaacaatacaccgcgtacctcaatgttaaggaaaaatgattatatcaggaggtgactccttatcctttgttgagaggatagggttaaatggacgatattgacagtctgattttaattggcgtgctcattgctttaaccgcgtttttcgttgcaagcgagtttgcgattgttagagtaaggagatccagaatagatcagcttatcacagaaggaaacaaacgggcgatactcgcaaggcgtgtcattacagatttggatgaatatttatccgcatcccagctaggcattacattgacatcaatcgggcttggcgtactgggtgagccggcctttgaacggctgctgcatccactgtttgaaccgctcggcttgccggactcggtttcacatgcagtctcttttgcagtcgcgtacggcttgatcacgttcctgcacgttgttgtaggtgaacttgccccgaaaacggtcgcgattcaaaaggcagaacagctgactttactgatagcgggccctttgcgtttattctatttgctcctgtttccgtttatttggatcctcaatggatcggcgcggcttttatgcgggatgttcggtttgaagcctgcgtcagaacatgatggttcccattctgaggaagaactcaggatgctgttatctgagagtttaaaaaacggagagattaatccgtctgaatataaatatgtgaataagatttttgaatttgataatcggatcgccaaagaaattatgataccgcggaaggaaatggctgctgtgtcaactgagatgacgatggccgagatgcttgaagtcatgctgaaggaaaaatacacgcgctggccagtcacagatggagacaaagacagtgtgatcggtttggtcaatacgaagcatttgttttctgatttgctgtttatgacagaagaagaacgaatgaagatgacgatccatccgtatgtgaggccggtcatcgaagtgattgaaacgatcccggttcatgatttgctgattaaaatgcagcgcgagcgcattcatatggcaatattgtcggatgaatacggaggaacctcgggacttgtgacgacagaggatattcttgaggaaattgtcggagagatcagagatgaatttgatgaagatgaacagccgctgatccaaaagcttggcgacggccattatgtgatggatggaaaggttcggatcgatcaggtgaacagccttcttggcgcatcgattcaagaagacgtcgatacgatcggcgggctgatattaaaagaaaacatcgatattgaggctggtgaatccattcgcatcggttcatattcgataaaggtgctgaagatggacggccgattaatcaagcaaatcgatataaaagaagaagccggcaacacaaccgggattacggcgcaccacaagctgctgctgcccgatcctgtgatgctgaacagtgcaaccttgagcgagaaataagctcaaggtttttttacattgtgattgtccagccgcaccaaaatgccaaaagcgatccgcaaagtgtcagggcgatgtacaagatgctttctattacacgtttggccataaggagttgaatagtttcaacgctgaaggtggaaaaggtcgtaaaggcgccaaaaaaccccgtgccgatgataagcgagaccgaagcatttgcaacgtgaagtcctgtaaatattccgagcccgagagctccgagaatattgactgtcagtatgccaatgggcaggctgagacctttggttttggcggttatgacattgccaagccagaagcgaagcattgcgccaagtccgccccctatgaaaatacccgctagtgtcatctttcctgcagcccctttctttgctgaatgcctgctatgcgccgtcccgcaaaaacaccaatcagtgcaaatatgatccctgatatcaatgaggctgccacatataaaagagccaatgagggttgtccttgcaaaagcatcactgtttccttagaaaacgtggacattgttgtgaagcctccgcaaaagccggtgcctaaaaaagccgacagcagaggccgttttgccccgatcagaaaaaatccggtcaaaatgcctaatagaaggctgcctgccgcattttccagccaggttgccgccgggaactgaccggtgtgtatccataagtttaatccgtatcggaggcaggcgccaagcgcgcctccgataaaaaccgcgctatatattttcatgtttgccatcctttatgatgaaatccgggtaatctgtaacgatgccgtccacgcccatggcttgtaattttgccgctgtcttttgattgttgacagtccatgcaaatatgtttaagccatttttatggatggagccgatcatcagacggttaagccgtgtgtgttttatattgacatagtttgcaaaagagcggaaggccttcatctgatttctggacagcatgccaaagttgggccttgtaatgaccgctgtcggaatcgaaggataaagctcgcggaacctttggacggagcggaactgaaaggattgaacaatattattgatagaaaaagaaaattgccctaatagctgtcccacctcttcttcaattccgacttgagacggatggccttttagttcaattaaaaggccgatttttttgtggtagcgcttgagcaccgcttccagggttggaatacgctctccttgaaaagcgggaccgtaccagcttcctgcatcgagtttttgcaattcctccaaggtaaaatccttaacaaagcccgatccgtttgttgttcggtcaaccctgtcatcgtgtatcacaacaatctgcctgtcttttgtaagctggacatccagttcgatcatatctgcattcattttcaccgcaaggtcaaatgcggcaatcgtattttccggagcgtagccggatgctccgcgatgggcaatgatgtacaagctaagtcagctcctcgtatgggcatttctgttattgtatcaaatccatatatgcaccgcgatacaaactggtgaattttttctgccatatcggaatggtccgggctgaggaatgcgtataactaaaaaaagacactcagcgtatcagaacacatttcgtcagaaaattaggtctttcgacatgttcacaacaaaatatgatcctttataatagcaaaaaaggaggcgagatcatgggaaaagggagaatcagagtggaggaaagaattaaagccgaaacggatgctgaaatgcaaaaagcaactctccttgatcagacacaaacgaaaaaaggtaagtgactgtccctattgaatctggctgatagatgaattgagaaatgaccccggcgtttcgccggggttttgtgctgcaaaagacatttaaatgaacatccttacgaatattttagtataataaacaattgattgggatagaggggagacagtcatgccggattatctgcagcagtattttacgcttgataacatcatacaaatcggcatcagcttggcgattttgctggtgtttcttatacttagaaaattattcacaagatatttctttaacctgctttttaatttgacaaaccggccgaaaacagaaatttttaaacaggtggttctggcgtttgataagccggccagatggttttttgttgcccttgggctgtttttagcgatccggtattcaccgtttttagatgagcaaatgccggtcatcagcaaaatataccgctcactgattgtggcgcttttgtgctggggtctttgtaatttgaccgcaacatcgtcgtttatcttccataaggtgaatcagcgcttcgagcttgacatggatgacattctggccccgtttttatccaaattgctccgttttgtgatcattgcgctcagtgtcagtgtgatcgctcaggaattcaattatgatgtaaacggatttgtagcgggccttggtcttggcggactggcttttgcgcttgccgcgaaggataccatcagcaacttcttcggcggtattatcattattactgaaaagccgtttacaattggtgactgggtggagacgtcgacagtaacaggatcagtcgaggatattacctttaggagcacgagattcagaacagcacagggggcgcttgtaacggtgccgaactctacgctgtcgatggaagcgatcacgaactggacaagaatgaccaaacgccagattacgttttccatccatgtgtcctacgctacgccgattgagaaccttgaacgctccattcattctctcagaacaatgctcttagagcatgagggcgttgataatgaaacaatcatggtcaactttgatacgtttgccgacagctactacaatttattttttaacttctatacaaaaacgacggtttgggctgaaaaccttaatattagagaggatatcaactataaaattattgagattttaggtgcagaaggtgtccagtttgcatatcccggccaaatggttgttgtcaagcaaaagcacgaaagtgacccattccaggtgaatctaaataaagaggaaaaggaacgggcttaaaagagagacttcgtctgacagaggcggagtctttttcatggtaaaataagagaaaaaggcggtgttgagttggaaacattcaaaagtattctacatgaagcacagcgaattgttgtgctgaccggagcgggaatgagcacagaatcagggattcccgactttcgttcagcagggggcatttgggcggaagatgcctcaagaatggaagcgatgagccttgattattttttaagtcatccgcgtctgttttggcccaaattcaaagaattgttccagatgaaaatgagcggcagctttgaaccgaatgaaggacacttgcttttagctgagctggagaagcaagggaagcaggtcgatattttcacgcaaaacattgacggtcttcataaaaaagcggggagcaggcatgtatacgaactgcatggttctatccagacagcagcttgtccggcatgcggcgcccgatatgatcttccccatttgctggagcgggaggtgccggagtgcacggcggccggaaacaatggggacatttgcggaacggtattaaaaaccgatgttgttctctttggcgacgccgtcatgcactttgacaccctttatgaaaagctggatcaagcagatcttttattggttatcggcacgtctctcgaagtggctccggctagatttgtgcctgaggatgcaagtctgattcccggcatgaagaaagtcatcataaaccttgaaccaacgtattgcgacagcttgtttgacatggtcatccatcaaaaaatcggtgagtttgcccgaagtttgggcataaaaaagtgagccgccttatgcgcctcacttttttattcatgaacaggaaccattgtgtcctctaacactccgaaggaatagcctttttcttttaatttattgattagtaccggcagcgcgtttacggtagcgggaagatcatgcatgagaatcacattcgggcggcctgaagagctgtgttccatattttcaagctgctctaacacggccgtcacatactgtgaatttcggtatttccagtccatgctgtcaatcgtccaatcccagtacacaaaaccgtctttctcaagattgcggatttgtgagggggttagtgacggtttgcttccgtagggcgttctgacaagagcggttttatatcctgtaatgtcctgcagtgtgtcacgcgcctcctgcatttcttttagcggagatgtcggtgtttgatagaacaatctgttattgtgggtaacgccatgtaaaccgagtgcgtggccttccttttctgctcttttcacagcctgcttgaattcgttcatccgcggtgacagcataaaaaacgtcgcttttacatcagcgcttttcagtacatcgagcaagcgggttgtaacggctgaagggccgtcgtcgaaggttaagtaaaccgttttatctcccatgttctgctttgtctgcagatgttttatcagcagatcgggggagtcgtttttcagcttaaggctttctttctcatctcgaagctggccgtttgttgtgacagtgacttcctttgctttcgttgaactgttggaataacccaaaatcaccataagcaaaagcagcacacataaaactgctaaacttgcaaatttaaaagcaagcgaaactgcagaaggagaagcctctcctctcgtttgtcgcataacaatctctccattggcataaaatctctacataatgctgtacagcaggcagcttatgaagatgccttatgtttacaacctatgtattaccagtcaagtatacaggaataaaactggaaagcacatagaaaatttgtcgaaatgtcagattttaaggaaaaaataaactcctttccgctatagatctcttgatctttctgtttttcggcttgtccaatatggtagaattagtgataatgacagcttgaatgacatcagggacatctcgaaaagggagggcttttatgaaggttttagtcaatggccggctgattgggcgcagtgaagcatcaatcgatttggaagatcgcggttatcagtttggtgacggcatctatgaagtgatcagggtgtacaaaggagtattgttcggcttacgtgagcatgcagagcgttttttcagaagtgctgctgaaatcggaatttcactgccattcagtatagaagatctcgagtgggacctgcaaaagcttgtacaggaaaatgcggtcagtgagggtgcggtatacattcagacaacaagaggtgtggccccgcgaaaacaccagtatgaagccggcctcgagccgcagactactgcttatacgtttacggtgaaaaaaccggagcaagagcaggcatacggagtggcggccattacagatgaggatcttcgctggttaagatgtgatatcaaaagtctgaatttactgtataatgtcatgacgaagcaaagggcctatgaagcgggagcatttgaagccattttacttagggacggcgttgttacggagggtacatcctctaacgtttatgcggttatcaacggcacggtgcgaacacatccggctaatcggctcattctcaatggaattacacggatgaatattttaggactgattgagaagaatgggatcaaactggatgagactcctgtcagtgaagaagagttgaaacaggcggaagagatctttatttcgtcaacgacggcagaaattattccggttgtgacgctcgatggacaatcggtcggaagcgggaaaccgggaccggtgaccaaacagcttcaggctgcttttcaagaaagcattcaacaggctgctagcatttcataaatgaacgaagaaaagagcccgctttatacagcggagctctttttattttttaacaaatccaatcaaaatggagatcatcggcgatatatagaggaagaacgtaaacgggatgtagtctatgactggaacaccaagtgcgctcgccataaatgcgccgctgacgccccaaggaatcaatgggttaattaatgttccgccgtcctctaatgaccttgtcagaaatttgcgctggatgttttgtttgtcatataaggatttaaatgattgtcctggtattaatatcgataaatactgttcaccggttgccaagttgacgccgatgcttgagcagacagttgctgcaactagacggccttttgagcggatgcctttcatgatgccttccaatagtgcagaaatcaatccgattttctccatcaatccgccgagtgcaaaagcaatcataatgagagagacagagcccatcatggattgcaatccgcctctgttgataattttagcggctgcctcattgtcagtttcgaaagttgtgccattttgcaaagctgtcataaacgcctgcaggctgctgtcgggtacaaaaatagcagtcaaaattcccgaggaaataattccggcagtcagaacggggattactgatacccgtttcattgccagcaaaacgactaagagcggagaaagaagggcccacggtgtcacgtttgcaacatcttttattccggttatgacctgctgaatattatcggttgaagcagcgtccgctgacactgatgaaccgagaaagtaaaacagaacgacagtgatgagcaaagctggaatggttgtgcccatcatatggcgaatgtgttcaaagatcggtatttcgcctattccggctgcaaagttggttgtgtccgacatcggcgacattttatccccaaaacaagcgccgcatatgactgcgcctgctgtccattcaagcggaacgccggccgcgctcgctacgccgatcagcgctaccccgattgtgcttacagttgtcaggcttgagccaacaagtgtgctgatgatcatacatgaaaacaaagcagtcaacagaaggtggcttggttcaataaaggatagggcataaactgtcacagtcggtattgcgccgctgtacatccaggcgccgattaagatgccgatcagcgctagaacaataatcggctgtacgccgtttttgatcccgtctacaatccctttttcaatactcttccaggaaaatccaaaccataaagctgctgctgaaagcatgacaacacttaaaaacagcgggatatgaggttctacatgaagcaagaataagcaagaaataataatgcataacatgaatataaataaaccgacggctaacggaaacgtcagctttttttgagaatccaaaataacaccccatatttatctttaatgcttttgtgcttttgggcacgaaagcattataacagaaaaaaacgaaaatctatgttttttcacaattatgaatataaaagaagtgagcacagggcgtgctcactttacaatcaggacgggtatatccgatttcgctgaaagcttttcacttacacttccgaatattagctttttcagcctgttttggtctctgcttccggttacgatcatatcggcagaaatgcggtttgcatgctcgataattgattcagccggatcgccttctaatatatcgatatctccatctgcctgctgttcattcagcatcattcttgcttcggcgatgacttcttccgtacggtcttcatagatcattggctcaggtgatgttacacccgatatcagcggatcaggaacacttgtcatgcctccgctgatatagcttgcctcagctgcgggtctgggtgggtcgatgacggtctgattgtctttcatatcatgtgaatgggcgacggtaatagcggcatttaaggttttagcaagatcaatggctgtctgaagcgctttcttactattttcacttccgtcaaacgcaacaatgatacggtcagcatggaacatccttctcaccctttcaaagcgtcttacaacactactacccgaatttgagcacaattaaccttttcctattcaagtaatgattgacaataaaaggttttgtttatatgatgataaaaagatgaaatcagaatggaaggagggtttgctatgccaaggaatttgcgtgtttatcaaacagtttcatattggcgcggcaaaccttttgttctgttttcgtgaacggttttttaggtcggaccgcgcgctgaaaagcgctgtgcgtaacatatcggttaaaaaaggcatggagctgacgcttcatgccttttttatatacaaaatctaaggaaagacaggtgtatgggatgtgaagacaaatacagaggcgagggctgttcatgccaaactggatgaaaaaagctgcaaggaaaaaatagaaggcggctgataaggagatggggatagatgttttcagttttgaaaaagcttggctggttttttaaggcgtactggctgcgctatacgattgcgattgtccttttattagcagtcaatgtcattgaaatgtttccgcctaagctcttggggaacgccatagatgatatgaaaacaggggcatttactgcggaagggctgctgttttatatcggtatcttttttgtgctgacggcggccgtgtatatcatgtcttatttttggatgcatcagctgtttggcggagcgaatctgatggagaaaattcttcgtacgaagctgatggggcatttgctgactatgtcgccgccgttttatgaaaaaaaccgaacaggcgatttaatggcacgagggacaaatgatcttcaggccgtcagtttaacgacaggatttggcatcttgacgttagtcgattctacgatgtttatgatgacgatctttttgacaatggggtttttgatcagctggaagctgacctttgccgccattatcccgcttccagtcatggcgattgcaatcagtctatatggaagtaaaattcatgagcggtttactgaggcccaaaacgcgttcggggcgctgaatgacagagtgctggaatctgtttcaggcgtgcgggtgattcgcgcgtatgttcaggaaacaaacgatgttcgccggtttaatgaaatgaccgctgatgtttatcagaaaaatatgaaagtggcttttattgattcactgtttgagccgacggtgaaactgcttgtcggcgcaagctatctgattgggctcggctacggagcgtttcttgtattccggaacgagctgacgcttggagagttagtgtcctttaacgtttatctcggcatgatgatttggccgatgtttgcaatcggtgaactcattaacgtgatgcagcgcggcaatgcgtcattagaccgggtaaatgaaactctttcttatgaatcggatgtgacagatccaaaacagcccgctgatcttaaagagcctggagatatcgttttcagtcatgtcagctttacatatccaagctcaacaagtgacaatcttcaggatatttcatttacggtgcgaaaagggcagactgtcgggattgcaggtaaaaccgggagcggaaaaacgacaattattaagcagcttttgcgccagtatcctccaggtgaagggagcattacattttcaggcgtaccgattcagcaaatccctcttgaccgtctccgcggatggatcggatatgtgccgcaggatcatttactgttttcacggactgtaaaagaaaatattttatacggaaaacaggatgcaactgataaagaggttcagcaagccattgccgaagcacattttgaaaaagatttgcacatgcttccgtccggtctggagacaatggtcggtgaaaaaggcgtggcactgtcaggcgggcagaaacaaagaatttcgattgcgagagcactcatggcgaatccggaaatcttgatcctggatgattcgctttccgctgtagatgccaaaacagaggctgcaattatcaagaacatcagagaaaaccgcaaaggaaaaacgacatttattttgacgcaccgattatccgcggtagagcacgctgacctgatccttgtgatggacggcggcgtcattgctgagagtggcacgcatcaagaactgctggccaataatgggtggtaccgggaacaatatgaaagacagcagctgttcactgcggaagaagggggagcaggggcatgaaaataggaaaaacgttatggagatatgcacttctttatcgaaaattgctgatcacagccgtccttttgctagctgttgccgtcggtgcagaactgactgggccctttattggcaaaaaaatgatagacgaccatatcctcggcattgagaaaacatggtatgaagctgcggaaaaagataaaaatgccgttcagtttcacggcgtctcatatgtcagagaggaccgattgcaggagcctgtttcaaaagcaaaagaagcgcatatttatcaagtgggaatggcattctattttgttaatcaggctgtcagcttcgacgggaatagaacggtttctgacgggaagctgacgatcacaaacggagacaagagccgggcatatgctgccgaaaagctgactaagcaggaacttttccagttctatcagccggaaataaagggaatggtgtttctgatctgcctgtatgggggcttgcttgtgttttcggtattctttcaatacggacagcattatctgctgcagatgagcgccaatcggattattcaaaagatgaggcaggacgtgttttcgcacatacagaaaatgccgattcgctattttgacaaccttccggccggaaaagtcgttgcgcggattaccaatgatacggaggctatcagggatttatatgtcacagtgctttcaacatttgtaacaagcggaatctatatgttcgggatattcacggctttgtttctgcttgatgtgaagcttgcgtttgtatgtctggcaattgtgccgattatctggctgtggtcagtcatataccggagatatgcgtcatattacaaccaaaaaatccgctcgatcaacagtgacattaacgcaaaaatgaatgagtcaattcaaggcatgaccattattcaggctttccgccatcaaaaggaaacaatgagagaatttgaggaattaaatgaatcacatttttatttccaaaacaggatgctgaatttaaactccttaatgtcccataatttggtcaatgtcatccgcaatcttgcgttcgtctgtctgatctggcattttggcggtgcgagcctgaatgcggcggggattgtttctatcggtgtgctgtacgcgtttgtcgattatttgaaccggttatttcagccgatcacaggcatcgtcaatcagttttcaaagctggagcttgcaagggtctccgccgggcgtgtttttgaactgcttgaagaaaagaatacggaagaagcgggtgaaccggcgaaggagcgcgcgctggggcgggttgaatttcgtgatgtgtcatttgcgtatcaagaaggtgaagaggtattaaagcatatttcctttactgcgcaaaaaggcgaaaccgtagcgctcgtcggccataccggatcaggaaaaagctcgattttgaatcttctgtttcgtttttatgatgcgcaaaaaggtgatgtcttaattgatggaaaaagcatttacaacatgtcaagacaggaactcagatcccatatgggtattgtgcttcaggacccgtacttattctcgggcacaatcggatctaacgtaagtctggatgacgaaagaatgactgaagaagaaataaaaaatgcactgcggcaagtcggtgctgagcctcttcttaagaagcttccgaagggcattaatgagcccgtgattgaaaaaggcagcacgctatcctctggagagcggcagttaatttctttcgctagagctttggcgtttgatcccgcgatcttgattttagatgaggcaacggcgcatattgatacagagacagaggccgtgatccagaaggcgcttgatgtcgtcaaacaaggacgcaccaccttcgtcatcgctcaccggctttcaacaatcagaaatgctgatcagattttggttcttgataaaggagaaattgttgagagagggaaccacgaggaactgatggcattagaaggccaatattatcaaatgtatgaactgcaaaagggacagaaacattccattgcataacgctcaaaaacccaaaacaatcgtgttttgggtttttggtttatgtagtcaataagccagtccgacacggtttccgacatactcacctgtaacgagctcacgatataaaaagtccgcagtatcgccgaccgaaatgcttgtgccgccctcaggcaaaacgttacgctccgtacgataaacgccggttgctgttccgtccgggaggtaagtggggcagatgattgtccagtctaatgatgattctttaagcatttcgtatacttttgcatgctccttggctgcgcgggtctgctttcgtttcgattcatttgtttcaaaccggtattttcccggttcatatcgggaatctaggatccctgcggtgccgatcgtaataagccgtttgatatgctgttcctccataacggagagaatgtgtgccatagcagttgacaaggtatcatcaccatctgtgcctagacagctgatcacgatttcagcattctccattatttttttcacatcttctaagcggcgggcgttccccatgacggttctgtcttttgaaaggggaagatcagcatgttgagatctgatcagagcgaaaatatcaaatctttcatctgctgcagcttgtgttaaaaaggcttgtccgacgcggccgctggctcctaataaagcgattttcattaaaaaacctcctcgcctttcattataaaaggatgttctcagtttgaacagcgcgggaaagaatacctgtacaaataaacagaacgatgggaaacatattcatgaatcatggatacacttacgaattgaaccagctcccaattcacaatggtgatgaatgacaccccgattccctccctttttttctaggatatgtggagcaggaaaaaagggtgacaaaataaagagagcgcggaaaccgcgccctctatagccatatattgaattgttattgaactctgccgcccatttgctgctgagcgaaagatactaaacgttttgtgatttctcctccgacagaaccgttagcgcgagaagttgtgtccgctccaaggttaacgccgaattcagaagcgatttcaagtttcatttgatcgatagcctgagctgcgccaggaactagtaagtcatttgaagagttttggttagccatgtgtaaaatctcctttttatttagtatggttgggttaactggagttgcaccaatctgtgaacccttctcgggtgtcactgccgcctcggcgtaacccaatgctttgccggcttgttactacgtattatgttaaaatggccggaaaatcatgcggagaattgtgtggtaaatcttgagaaataaaaaaagcttagccgtttaggctaagctagtcataaatatgaaaaagcatcagttcatgtatctcgtttgtaagagcaggctcgtcagcgcgggcgggaaacaagtctccccattcaatctcaccgctcttatgatagatgccttcataatgggtccctttataataaaatgaaattttccatccgggcagcttttcttttgggaacaaaggtttccagctgaaatgagaaatcattacggccacgctccttacatttggtatcaattgacctaaataaaaacggcttatgttcattgtatcattgtttcagaacatcattgaagaggcctaaatatgcagtttgtcccagctttggataaagataagcccgctttattaaaaaagcggacaggttacgaaggccacaatgcttccggagatgtgattgccttctcagataaatatgacgcgtattcaaaacttcttcgttttgtaagagaatcaacatgatgcaaatttggatgagaaaaaatgcttcggcccgggcgcgaattcgcttcaaacatccatactttaccgttctgatcaatgccaaaatcgaaaccaatctccccgataaatccctcgatatgatcatgaaggacatggcttgcagtcagtgccgctgcagaaagctttttaatgacctcaactctttcagcgggatcatcgtatacttccgcaagtgtctttacagtgccgccgttagaaagatgtgttgtaatgctgttctttccggaaatttttacggcgattgctgtcactgtccattttccttttctgtttttattggtatggacacggaaatccgctggtttgccttgaaattcgatgagatcaacaccttgctgaatgagaaagtcggacgggttgtgatgtttttgaaattctgcaaggaatgaggcggcatcggaataatcaattgatgtaaaagttttggcgtcattcgtatgctttaccgtcaggccgccatctgttcttgtcagctgataaatgccggtgccgagtgctccatttgccggtttgatatagacttttttgtatgcgccacagagctcatcaatcagctccacagacggtgtcagctcggatctaggcaaaaagggtgccgttctcggatctttttcgagcaattgatgaacgttccatttattgaaaaacgttttattaaaccatgggatctgatattcatcgatcagcctcttttttgtatgttgcaagagaagtgaatcttcaatttttcggttcggcaaacggtcataaacgacgttcggcaatggaacgatttttttctcccagccgttttccctgtaaaggaggccttcaatcgtgccttcctcccaattgatttggtgcgcgccaaaaacgaagcagtagcccccggcttgctcgtgtaacgtgacaagtttagaaaaaaagagggaacgatccttaaatggacgttcaagagatacagtaaaccctgccgtaaagatgccgactaacggcccgatatgcactgtatgatcatgaatcagtatatcagccctgcttcggtggggaagcaaaagctcatgaaacagattttcagagagaagcacggtttgttccagatgccgtctgtaagcaacgtggcatctgacaaccttcgttccgaatgcggcatgcaaaagtccgtctcgcttcagcgaagagggcagaaacagggtattttcactggttttgtctatgccgatcaaaaaccgtttaggattcacgcggaagaactcctttctggctttgctcagaaaacagatattggcagcgctttaggggacaagtgtacagctgttctttttgctcgggagagacacgcaggattgactttctgcctggtttggaattgatatctaaaatccaaattctcccgtccttagcaagacatatatcaagaccgagttcaaacaacggcccatagcgctcgtcaagataatacggaaccgattgggtaatcgaaaacacatcatctagtaagaccacttgctgttttttcggtatatcttcaaaccaggagtcaaatgtcagcgcatcagatccgcctgacaaattggccagcagcccgtgtttgtatccgcgtcttactgcctttccgactgtattccattcacctgcttcgtttttttccataaacaggcgaatatcacaagggtattgttccttatcttgaatgtttaagtaaggctgaagcaaatattgatgctgaagcacttttttgcaccatgttttaaaagaagtctggttggaaaacgtttttgtctgcttatcctttccgatgtgataagtagcagtgatgtttttcttgcccagcttcaaaagaatcacgcctctgcctcccgcgccaaatgccggtttaaggatgcaggctttttctttggataaaaaggagtgaatttgttcgtagcggctcacctttatcgtttcgggaatatagggattgattacagagtgctgctgcaaatcgtgaaggacggtccacttatcgggaagaccccgcccgataaattccgttttcggatattttttgagccactcaacgattggttttgctttttgggaatgtgaatccttgccgtaaaaacagcgatcataaatataatctggaatcgccatttcagtttcgttccatgtgctgctggccgaatgatagaccgatgctttgacacgcaaagtgtcaggtgaaatatcaaatggtgtaaaccggatgaaacgtatgccgaattcgggtgctcttttggccagttctgcggaataatccgcttcatgctggcgggataaggacataaaaccgagtgttatcatggtgagactcccccttttattcaaaagctgccggcgggtgtccgcagctttacactaaatacatgtaagacgaacgcagctgacggtattctactttacagaatacgattctccaccttgccctattccaaaagaacaagctgattttctaagaacaggaatttgtctcctcgtttgctaagtgattgcatgagcctctataatacgtataggtacataatctatatgaaaaaagctgaagcacagatggaggaagatgaataggaatgggtattgcaggaacctttatttttatgatcgtgatcggcgctgccattggagcggtgaccaatcatttagcaattcaaatgctgtttaggccgtataaagcgtactatttgtttgggaaacgagttccttttacgcccgggctgattccaagacggcgagatgaacttgcaaaacaaatgggactgatggtagtcaatcatctcttaacccctgaaggcattaaaaagcggctcgtctctgatgcagccaaaacgcaggctcttcgagtgggggaacagctgattcaaaagctgtcactttctgaagtgacagtaaaagaagcgcttgaaaaagccgggatgaagcgcccagaaaaagctgctgatgcatggatcagcagctggaccgatgataagctgaatgagcttttccgccaatacggggaccaatcgttaaaagagctggtgcctatagaggtgcaggaaaagcttgaggaaaaaattccgatgatttcaggatatatattgtcacggagtgtcagttattttgaaagtgatgaaggaaaaatccgtcttggcaatatgattgatgactttttaaaagagcgcggcatgcttggaagcatggtgcaaatgtttcttggcaattcaagccttgcggatcgcgtgctgccggagctgctgaaattcttgcgcaatgaggaaacaaataaattgctttctgatctcttaaaaaacgaatggggcaagctgagggagtatacgtttaatgaagcagatgaaaaatggaatgcaaaggcgctcattttcagtttgaaacgaagagtgctgcaagcattttcgactgcccctttcttcgacaatacgattggcacgcttaccgtccgctatgaatctgagctgacccagcaaatgctgccggcactgttagacaaattgcttgaagggatttcgtccaaccttgaaagtgtcttaaaacggttgcgtcttgaggaaatcgtcaaggagcaggtggatcagttcccggtggagcgtcttgaagaaatggtgctgtccatttcaaaaaaagaatttaaaatgattacctatttgggggccttctcggcggaattataggcgcgattcaagcattgtttgtcatccttttttaagaagaaatggtttttgattaatgaaaggagctccatagtctgttatagtggagtggtatgtcaaacggcaatgatgaaaggagctatttacaatggctgttaatttttatgatgtagcgtatgatctggaaaatgcattacgcgggagcgaagagttcacccgtttaaaaaacctttacgacgaagttaacgcagatgaatcagcgaagcgcatgttcgaaaacttccgtgatgtacagcttagactccagcaaaaacaaatggcaggagaagagattacacaagaagaagtgacgcaggctcaaaaaacagttgcgcttgtacagcagcacgaaaaaatttctcagctgatggaagcggagcagcgcatgagcatgctgattggtgaattgaacaaaatcattatgaagcctttagaagagctttacggcagtgttgaaggctaataagcaaaatcccttcttggataagaagggattttttattcattcagcaaacttggaaatccaatgaatcttttacctctccattgatgatcactgataatgtatgaattcctttgtaatgctttctggtggttaaatccttaaaggattggtttcttgtgtatgacttcgtttcgttttttcgtatagttgtttctgttattttaaatactttctgatgacgctggcctcttgcttttacaaaatcaattgcgtactcaattcttactttttgatccctgtctgaatgaatatagaaagaaaattcaaggctttcgccaataactatacgtttgggctggcctgttaaatcatgtagttgtatcgaatcagcattttcataaccaaaaagcgctaaggcctgtttatcacccttttttaataaggtccgataggcgtgtttgataatccagtctgtatggggatgtgttccgtaccattgatctgcgacttttctcagtaaatgaggatgcgtttttgatatatcattaaggttgttggccacgctttttcttacatataaggactcgtcctgcatcagcttctcaaggatcggcaatacgggggaagggtccgatttcaaagccggtatcgattttccccatggcaggcggggcctgctgccttcgctcgcaagtcttctcacgtgttcatttttatgctcagaccatgcaagcaattgtgcaaccatcttttcttgatctaacagcaaaaaaggccttacagcaaattctgaggtcgaatattgcgtaaagtattccaatgcctttattgattcttcccaatgcgctaacccgtactgttccacataatctggaaataaaattccgctgagtcctttaaaatgaggggctgtatcccgtaaaattgtgagcgcttcaacgtattgttttggcaaagtttcgtataaagaaactgtcacgcggcgcatccgctcttttaaagtgagttcaggccagtcctccagccgtaatgtatcctcgaatctgtctttgttaaaatcaggataggatgaccttacatgatggatcaactgagatatcagttcttcattatatatttcttttaaatcagccatataaacaccgctttttcgtttattatttatattgtatgggaatgtacgttctggatcaagtgtatagtcctaaaaattaacaactgatcctaccacggatatacaaaagttggttactttttttagttaaaaaaacccttgtcatcggaaaagaaaactgagataataacattgaaagcgcctacacttacctatttcaaatggatacggtcgcatatcatgccgttatatagaggggataagcaacagagagtaagtgttcggagcgcatcattggtcaaacaaggggttcctgatacatgatttttcgtaaatcgaaataacgatattagggagaatggctgcttcgatcgtatcctatcaacaagccatacataaagtctgctgagccaggctttttttgctttaagaaaaggttgttctaaacacagagacagggtcatatcctatacacaagtacagtcatcaaggagggggacatctctgtgtcaaaacaattgcttgccttaaatatagatggagcgctgcttcggtcgaacgggaagattcatcaggcaacgaaagacgcgattgaatatgtaaagaaaaaagggatttacgtcacacttgtgaccaaccgtcattttcgctcagcacagaaaatagcgaaatcgctaaagcttgatgccaagctgatcacccatagcggggcatatatcgctgagaaaattgacgccccgttttttgaaaaaagaatttctgatgatcatacctttaacattgttcaagtgctggagagctatcaatgtaatattcggcttcttcacgaaaagtattccatcggaaacaagaaaaaggtgaattcgaatttattggggaaagcactcattcatccgtctgacccgatcttttatccagtccagttcgttgaatcattaagcgatctcctcatggatgagccggtgagtgcacccgtcatcgaggtgtacacggagcacgacattcagcatgacattacagaaacgattacaaaagccttccctgcagtggatgtgattcgcgtaaacgatgagaagctgaatatcgtcccgaaaggtgtctcgaaggaagcgggtttggccctcgtcgcttcagagctgggcctgagtatggatgatgtcgtggccattgggcatcagtatgacgatctgccgatgatcgaacttgccggtcttggggtagcgatggggaatgccgttccggaaattaagagaaaggcagattgggttacaaggtccaatgacgagcaaggtgtcgcttatatgatgaaggaatatttccgaatgcagcagcgaaaaggatttcttgataagttccacatgaaacgtgtgtaaaaaagccgctcgcaccctgacaggtgcggcggcttttttgccggattgattttagcagtttatttctgtacactaaagaaagttttgaatctgataaattaggtgatgaagttgcaaattaaaatagaaggcatacatgatgaccgcctgcatcggcctctgcaaaatattgcaaatttgttttatgaagagtgcgagcttgcgtatggcggagaggagcccgcagattttgtcatttctttagcgttgtcacaaacggatgagcatgtgacggtttcgggagaagtgaagggaactggcataaaggaacagcatacaaaattcttttctcccggcatgaatgaaaaagaagcttttaagcaagtgaaaaacacaatttcttatgtgtatctcaatcttcttcaggcgcatacgggcattacgcagaagtggggaatcctcacaggaatccggcccacaaagctgcttcataaaaaactgcaaagcggaatgtccaaggagcaagcgcatgctgagttgaaaaaagactatttaattcatgatgaaaaaatcatgctaatgcaggaaattgttgaccgtcagctggcggcagttccggatttgtaccgagtaaaggatgaagtcagcatttatatcggcattccgttctgcccgacaaaatgcgcgtattgcacattccctgcgtacgctatccaaggacaggcgggcagagtcggctcattcctatggggactgcattacgaaatgcagaaaatcggtgaatggctgaaggagcatgatgttaaggttacaaccatttactttggcggcgggacgccgacaagcattacagcggaggagatggatctgctgtatgaagaaatggtccgctccttcccggatgtgaaaaacattcgtgagattacggtggaggccggtcgtcctgacacgattacagaagaaaaactcgccgttttaaacaaatatgacattgatcggatcagcatcaatccgcaatcctacgaaaacgaaacgctaaaggcgatcgggcggcaccatacggttgaagagaccattgagaaatatcatctgtcacgccagcatggcatgaataatatcaacatggacttgattattggtttgcctggggaaggcgtgaaggagttcaggcacagtctttcagaaacagaaaaactgatgccggaatcccttaccgttcatactctttcatttaaacgggcgtcagaaatgacgagaaacaagcataagtacaaagttgccggcagggaagaggtttctcaaatgatggaagacgcggtagcctggacgaaagagcatgggtacgtgccttattatttataccgccagaaaaacattcttggaaaccttgaaaacgtcggatactctttgccgggacaagaaagcatctacaacattatgattatggaagaggtgcagacgattattggcatcggctgcggcgctgctagtaaatttattgatcgggatacagggaaaattacgcattttgcgaatccgaaagatccgaaatcgtacaatgagcgcttcgagcactacacggacgaaaaaatcaaatatttagagcagatttttgaaaaaacgacaaagcagcactgatcacagtgctgctttttttatccctgtttttttgcgggctgaacctcaggcttccatttaaataccttgttaagcaagcggtaaattcgttttgattcctttgtgacaagcggtcccaaaatcgccagaatgaggacatataatgcggcaaacggctttaatgtggccgacagtccgccggctatcccgagattcgcaacgataatcgaaaattctccccgcgatacgatcgtcagcccgatattcgatgaagccttatgagaaagccctgcgcgtcgtcctgccaccattccggcgataaaatttcccagaatggtcaaaatcactgcacccaacgcaagccaaaccgcttcacctagcgaaaacggatcgatactgaggccgaagctgaaaaagaacatcgcaccgaagaagtcgcgaaacggaacaacgaggtgttcaatcctatcggaatgctctgtttctgaaaagaccaaaccgagcagcagcgcgccgattgcttctgctacatgaatcgtctcggaaaacccggcgataaaaaagagcgctgcgaaaatgacgataataaacacttcgtttgagcgaatgtccaacagtttgttcaacagcggcgggagttttcttgctgcgataaaaaacagcagcatataaccgaaggcgatcaaaatggacaagagtgcactccctacggatgtcgcatcacctagtataaggccggaaacaacggacagatatacggcaaggaaaatatcttcaaacatgatgatgccgagaatcaattcggtttccggattggcggttctttttaaatcaacgagcacttttgcgacaatcgcacttgacgagattgtgatgacgcctgcgaggatgaggacttccagaaaggaaaatccggtgataaacccgtaaagcagtccgaggctgaagttaatcaaaatataaatcgtcccgccgaccgcgattgattttcctgatttgattaacttcccgacagagaattcgagtccgagatagaagaggaggaacagtacgcccattcgcccgaaaaactcgatgatttcactgctttgaataaatgttagatcaataatccccattttcggcgcgtgcggtccaacaagcattcccagcacaatcagaaacggaataatcgaaaatttaattttattggcgatcacactggcgattgccacaagcacaagtgcagttccgacttcaaatacaagatggtccatcggggctcacacgccctctccagaaagaaaatcgtgaatcagtttcttcagatgctttctctcacctgagaggacaagggtgtcattttcttcaataatcgaatccgctccgggatttaggagcttttcctggttgtgtttgataatcgcaataacagtgacatcgtaattctggcgaacatcaagctcaccgagtgtgcgtccgatcgatttggcgcctttttcgaccttaaaccattcaataataagatcgctgaaggccatttcgatggactccagagcttgcggtttatagaccatgcccccgagaatagctgcaatttgccttgcttcagaatcatccaatgaaatatttgaaagaagctcatccgggtcccggtcattaaaccggtaaatttcccttcttccgtcatcatgaatgataatcgtcattttttcgtggcttcttgtttcgatttcaaactttttgccgatgcccggcagatcgttttctttaatattcaatgaaaatccctccgaatgtagtgttggcagtatggggtgagttacaaataaaacttgagcaaattatattcggaggtaattagactggtatttgacagggacggcacaagccttttccagcctgtttatcagcggttcgtcaagtggtttgacagagagatgcctgacagactgtgccagcgggctgtactctttgatcagctcagccgggtgaatgctgcccggcgacggcgtttttgccgattgtgtttcctgcggatatgaggacataggcacatagctgtcagtgcttgcttcaaactgggaaggcagaaccacgtccgaagggggaaagtacaccataaataaacttaacagaaaactgatcagcaatttatccatgtcctttcctcccttctcatcaagatatcccttctttttcactatataaaactttatgtttccattcaaacaatatgcatttttcagtatctattgaccttgaaaaataaaaaggtttatttggggatggcggggaatgtataggagaaagaaaaaagtaagcgcatacatggaggtgcttttaatggagtttgttcaatatgcatgtaatggggccgttgcagagattatcctgaatcggcctgatgcccatcacgccctgaatgaacagatgctgtctgaattgaaggaggcagtcgaaatggcggctgcaagcgaggcgctcatcgttctcctgagaggaagcgggaaaggcttttcggccggcggtgatatcaggatgatgacgtcagagcatgaccctgaccaatttaaacggctgatggatacgattgaggctgtcaccctgaatttatatcagatgaagaaagtgacaattgcagccattcatggtgctgctgcgggactgggcctgagtttggcgctttgtacggacattgtgctcgctgaaaaaaacgccgttctcgcgatgaattttatcggcattgggcttgttccggacggcggaggacattatttgctgaagaaaagaatcggtgaagcaaaagcgaaaaaactgatttggagcggaaaaaaactatctgcctcggaagctgccgatatggggcttcttgatgggacatttgccggagaccctgccgaaggcgcaagacccattatcgaaaccctgttggcctcccctcttttggcgatgatcgaaacgaaaggtatttttcaaagcctccaaattgaagaactgaaaaaagtgctatcccttgagcgcagcgcccaagagagaatgagaaggaccaaggatcaccaagaaggaatccgtgcctttttagaaaaacgggagccgaagtttcaagcgtaacagatcagccggaaagctgatcatctgtgaaacaaaatcagctttccggctgcattgactaaacgatgagtatgactatgaagctctttttcttttaagagggcttcaccatgcgtttttgccgcttcttcatgttctgcctcgaattgctcgtttaccagcgtgttccccgaaggatcaaatacggtaaggaaataatcagccatcaggtttctcctccattttaaggtttatcagtctttcttcatttatattctaaaaaggaaatcaaaatcctttattatgctttatccaaaattagtatataatgggtcagggaaggaggagattcagtgcttacaattgatcacgtaacgaagacatttggagattataaagccgttgacggattggacttagatattccggaacagcaaatgttcggtctattaggcgcaaacggagcgggaaaaacaacaacgtttcgcatgatcctaggattattaagcattacggagggctcaatcagctggaagggccgtcctgtgaattatcatatcagcaacaaaatcggttatttgccggaagagcggggcctttatccgaaaatgaaggtaagggatcagctcgtctatcttgccagattaaaagggatggagaagcgagaggctgtaaaagagctcgggacatggcttgaacgcttcaatattacagattacgagaataagaaggtggaagagctttcgaaggggaatcagcagaaaatccaattcatttcggcagttttgcataagccggagctcctgattcttgatgaaccattcagcggcttggaccctgtcaatgttgagctgctaaaagaggccgtgatctcgctgaaaaacagcggtgtttctattttattttcaagccatcggatggaacatgtggaggagctttgtgagaacctttgcatattgcagaaaggaaaaccggttgtacaaggcaagctgaaggagatcaagcgttctttcggtaaaaagaatgttaccattcactccgatgacgatctgcgctttttgcagtcccatgaaggcattcttcaatggaaggaaacggcagacggcgtcaagctgcagattgccaatgaagacatttctcaagagatttttgcgatgctacagggaaaagggtttatcagaaagtttgagcttgaagagccgtcactgcatgatatttttatagaaaaggtgggggccgtctatgaataaattttggatcatgctttctcatacatacaaaaataagattatggcaaaatcctttattatttcgactgtcatcacggtgctgcttgttttagttgtaacgaatctggagtcgatcatttctttgtttcaaggtgacgatgcgaaagaaaaaatcgccgttgttgatgaaacaaacgaattatatccggttttttcaaagcagctgaaagcggtggatactgacggcgatcttgatgtgaaactgtcgaagcaatcggaggatgaggtcacaaagcaagtcaaagatgaatcactcgatggcatgctcatcatcaaacgagatgaaaaagggaccatttcaggaacatataaagcgttaacgatttctgatgaaagcacgtatcaaacactgcagcaggcgctgacgcaaaccaaaacagctgtcggaacagcggagctcggcgtgtcgcaggaaacgatcagcagcctttatgcgcctgttactgtggggcagaaggcgctgaaagaaggggcaaagtctgaggaagagcttggccagacggtagggcttgtttacattatgctgttcgtcatttatttctcggtgattatgtatgccagcatgatagcgatggaggtcgcaaccgaaaaatcttcgcgagttatggaaatcctgatctcaagtatgccgccgatccagcaaatgtttgcaaagctgcttggtatcgggcttgtcgggatcacacagcttgctattattataggagccggctctctgtcgcttaagctgaaccaaaagagcgaaacggcttcatctgtcggcggattccttaatttgaccaacgtatctgcaaccactgtcatctatgctgtcattttctttttgctcggatactttttgtacgcgacacttgccgcgtttcttggcagtgtcgtcagcagaatagaggacgtgcagcaaacgatcacgccgatgacgcttttggttgtcgccggttttatgatcgcgatgttcggtttgaatgcgcctgacgcaggatttattacggtaacttcgtttattccgttctttacgccaatgattatgttcctgcgcgtcggcatgcttgatattccgttctggcaggcggctgtcggaatcggaatcacactgctcaccattgtcatactggccgttatcggcgccagaatttataaaggcggtgtattaatttacggcaattcaagcgcgttcaaagcgatcaaacaagcgctacgtttagcgaaaaactgattggaaaacagcctggggattctcaggctgtttcttttttgacagaacgtgcattcgcaagaattcggtgctaaaataagggtacttcatcctggaaaggagcagaatgttgactgatctaacctttattcatgcggcagatcttcatcttgacagcccgttttacgggatatcgcacctgccggagccgatttttgcccggattaaagaaagcacgtttgcaagcgtgagacatatgatagacgccgcagtgagagagcacgttgatttcattttgctggcgggagatctgtttgatgaagccaatcgaagcttaaaggctcagctctttttgaaaaaacagtttgaaagactcagagagtgcggaatttcggtatatgtcatctttgggaatcacgatcatcttggcggggagtggacgccgattgaatggcctgagaatgtccatattttttcgtccgctgttccagaagaaaaatcatttttaaaagaaggcaggcgcatagcaagcatttacggcttcagctatcaagctagagcagtgacggaaaaccaagccgcccgctatcggagatcaactgacgcaccgtttcatatcggcatgctccacggcacgctctcaggatctgaaggacacgatccgtattgcccgtttacccatgacgatctcgtgaaaagcgggatggattattgggcgcttggccatatacataaacgccaggttctatctgcagagcatccggcagtcatttacccgggaaacacgcaagcacgccatatgaaggagacgggagataaaggctattatctcgttcatgtgacaaacggagatatatcttatgaatttcagagagcgcatgatgtcctgtgggaaaaagcggcggttgatgtgacggaggcaaataatatgaccgctctcttccaaatggtggaggacacgttttcgaagctgcggaaaaaggggagccctgtttgtgtaaggcttgttttacaagggacggcgccggaatggctgctggaggcgccaaaaggcaccttggatgagtttcttgaagctcttcaggaacaagaagcggaagaggaacatttcgtttggcctcttggattggacgatgagacagaaaacgaagcaaacctaacaaaccttgatcctttttttggcggtttatttgaagacattgatcgcagcgatctgtcagacgtgctggaagggcttgagcggcatccagtgtatagaaggcacgcggaccggtttagccaagaggaggtaaaggaaataaaagagcaggcacagatattattgaaaagacagcttaaggtgcttgatacatgaggcggtgacagctttgcgaattatatctttacatatctaccaatacggaaaattttccaatcggacctttgacttttccgcctctcctgtccaagtcatctacggattaaatgaggcaggaaaaacgacgatgatgtcattcattgaaagcatgctgttcggttttccgaaaacgaaaaagtatgaaccgaaaacaggcggtgtctacggcggtgttcttgaagctgaacatcctgagtatggggtgctgaagatcgaacggacgaaagggactgccgaaaaactaagcgtgtacacagaaaagggcgaagtaaagcagggagatgttttaaagcagctgttccagggcacagacaggtcgttgtacaaagccatatattcgttcgacgtattcgggctgcaggaaattcacgcctttaatcgggacaagataggggaatttttgctcttttccagcttgtttggtgctgaagccgtatcaaagcttgattcaaggctgacgaaggaaagcgaaaggctctataaaccaaatgggcgaaaccctcaattgaatcaggagctggaaacgcttaagcagctggcagttaagctaaaacaggctgaagcagaggaagcgggctatcatcagcttctcgaggaaaaacgaacgcttgaagcccgccttgcagccgcggaaaccgaattgaaagagacggcgggacatatccgaatgattgagggagcgattgagcgaaagccgctgctaaatgaaaaagcgacactcgaacaggtgattgcagaatttccggaacacgcaggacaatttcctgctgacggactgcatcagctggaaaaatatgaatcccatcttcacccgaaatcagcacagcttgaggcgcttcgggtgaagatggcggagttggacaaacagaggcaaaagcttatccccgataaagaactattggcgaaagaaacgctgatacaagagctttcggcagcgtttcatatgtaccaatcctggggagaacagctggcagccattcaggcacagctgcgccagacgtctgcgcagacagcggcagggctggaacagctcaataaaacggatgaaaatgagctcctgaatatgaacacctcatatgattatgaatggcagcttcagcaagcggtgcagcaatatgtacaggcaagagacagaaaacggcagcttgacgagacgtttgaacttgcccggcaagagctggaagacgcggaaaaggccgttcgtgccgcttcgtccgcgattcttgaaaacagccaaagaaaagataaagaagcagctcttagagcatatgatgaaacacaggggcagcaccaagagcaagcgaagctcagagaacagctaacgttttttgaaagacagcaggctaaacagaaaaagactgtcattgcagctggtatgttgttcatcgttctcttttctctgctgcagcaatggattcccgccataagtttcggcgctgcacttattgtgtattggcttgtttcaggaaagtcgtcttctcgaaacagccgagagacaagacagcccatgacggatatttcaccagcagaagctgaaatgcttagagaagcgttatgggaggatgaccgcaataagcagcaccttctcacacagcgtgcagcgctccagcaaaaagaggcggcgtatgaaagggtcatccagcagtttgaacagtgggaagccgaaatggcgccgtcctttacacaggttgagcgttttatgaatgagctcggatttaaggaagatccatcatttttgcttgatgcatacagcttaatgaaggatgttaaaaaagaagtgaagaaaaagcatgagctgaccatagaagcaggcaggctgaaaaagcaccggagaacattcgaagaacgcgtcagtatgcttcttcccgtgaatcagagtcaggatatctccatttcggacgcccttcacacattgcggaaaaacattgaacgtgaaaaagaaattgagaagcaaaaaaaggaaattgaaacagatattcattatacaaaggaacagatgcttgaacttgagcaagaaatacagtatttccacgcacagattgaacagttatttgccgcggctgctgcaaaagacagagatgcgttttttgccatagccgacatcagcaggcaattgaagggtacggagaacaagcttcatcacgtaaacgcacagcttcaaggcgggtacccggaggaacttgaactggcggattccaatacgctttctgaattgaaagataagcaatttgttgagaatgaaagaaaagagcggctgactgaggagatcgagcagctccgcagccaaatcgcactgctctcagtcaaacaggaacaattagaggcttcgggaatggtctcagacctcaagcttcaaaccgaaatgcaaaaagaacgtgtgaaagaaacggctaaaaaatgggcctccatacaaatggtcagacaggtgatcagaaacaaattggagcggcataaaaaaatcgagcttccgcgccttctagagacggcaggagaatttttccgccctctgactgacggaaactaccaaaccatttatttttccgaaacggatgattcgatcatggttatgcatcgcgatggaactgtctatcatgcggaagagctgtcacaagggacatgtgaacagctgtatacagcgatccgatttgctttggccgttacgcgccagggtgggtcaaagcttccgttccagcttgacgacagttttgttcattttgatcaggaaaggctgaaacgtgtattacatgttctgtatgatttatctgaaggcggtaggcagattttgtattttacatgccatgagcacgtaaaagatgcatttcatagcagccaaatcatccatttggtgtcataaaagaggttctatagctgaaaatcggtatgtgatatactggtattatgtaagatacggagggagctttaatagaatggctaaagggattatgctacatgaggttggcgaacaggtggaccagtatctattgattaaatcctcgacgaaagggattgcaagcaatggaaaaccgtttttgacgctgatgctgcaagaccagtcaggcgatattgaagcgaagctgtgggatgccaagcaaagtgatgaagtgacctatgcgccacagacgattgtcaaggtcgtcggcgatgttcaccattatcgcggacgcacccagctgaagctgagaaatatcagaccggtaagcgagcaagaaaacgtcaatattgatgattttttagaaaccgcgccgattccgaaaaatgaaatgatggacaccatcactcaatatatatttgaaatgaaaaatccgaatatccagcgaatcacaaggtttttggttaaaaaacacgaagctgagtttatggattatccggcggctacgaaaaaccaccatgagtttgtctcaggtttggcgtatcatgttgtctctatgctgaacctggcgaaagcaatagcagatttatatccgtctcttgatcgtgatctgctttacgccggtgttatcctgcatgatcttggaaaagtgaaggagctgtccggccctgtttccacttcgtacacggttgaaggcaatttgctcggccatatttcaatcatggtgacagagctttcaaaagcggctgaggagcttcaaatcgattctgaagaggtgttaattcttcagcatttgattttgagtcaccatggcaaagcagaatggggcagcccgaaaccgccgatggtgaaagaagcggaaattcttcactatatagacaatctggatgcaaaaatgaatatgatggacagagcgcttgagcgcgtgaagcctggcgagtatactgaacgtgtatttgcactggaaaaccgttccttttataaaccgacatttcataaataacttaaaaaggactgatgctgacatattcagctcagttctttttgatgcgtctttcccgcacataactcgtctcattcccgcatatggttaagaataaagaatctatgcaaagggggaggagcccgtgttattttttccgtggtgggtgtatctttgtattgtaggcattattttcagcgcatataaacttgtgacggcagccaaagaggaagaaaaagtagaccaggcttttattgaaaaagaagggcagatttatatggagaggatggaaaaggagcgagaacgccgcagttctcagcagcatgaagaagaaaatcaaaaccattccatcgcataaaaaaagctgtgcggctcaatgagcctgcacagcttttttattatttagaattgcttgaagatgaagaagtgctgttacttgttgaagatgtattaaatgtgtctttcagatctttatcttttacttcgatgtcagccttcttcatgactttttgaacagcttcctgaacggcattgctgtcatttagtttttgttcaagcacttcagatttcagttcttttttcatatcttcatattttccgcgttcttcagtctttttgatgatatggtagccaaattgtgttttcacaggattgctgacttcatttgttttcaacttgaatgcagcttttctgaatgtggaatccagttgttcgttatcttttgaaatccagccaagttcgccaccgtttgtagcagtggagtctgttgagtattctttcgcaagatcttcaaacttttcgccttttttcagctttttctctacttcttcagctgtctttttatcagcgacaacgatatggcttgcgcgaatctggccttttaagccttcccagtattctttaatttcatcatctgtaactttgatgttatctttagccgctttttgtgtcagcaattcatattttacttgttctttcaggtaatctttgccatattgcttttcgagggcagtatattgatcgccaagctgcgttttatattctttcagcttgttgtcaatttctttatccgaaactttatacttcttgtccaatactttttcttgcactagctgtgtcagtacgcttgcgccagctgttttcttcatgtttgtgtaaagctcgccttttgtgacatcgcctgcgtctgtttttgcgataacttctttgtcgccgctgctgcaagcactgagagcgaggatgcttgtagcagtgatagctgctattgcgattttcttcattgttttcaaacactcctaatcattccaaattaaattacctatgcgtatcataacatattgtggctttctgtaaaaagattttaaataaagggcattcgtctagtcaaacttttgctgatgacatacttatatattgatcaagaaaaggaggtatgtaacatgagcggaggatactctaacggattcgcgttgctcgtagtactgttcattttgcttatcatcgtaggtgcagcttacatctactaagcagcccgaggatcgcttgcaacataagcgatcctttattttcactagcgcctaatcgtttcaaacatgaattgcataacatgtaattggtaaataaagcttattacaggaggtgctttttaagatgggtgaagtatttgcaggcggattcgctttattggttgtgttatttattttattgattatcatcggcgcttcttggctgtactaatcaacataaaaaagcatagctgcttaatcagcagctatgctttctttcgtatttacactgtaaaggagatctccacaaacgaagagatcagtaaaattaatatagatacattaataaatcggaataccttatcttgccgctcttcaggaatctctctgacaaggcataatgtattggtgagcctgtttatgaaatataaaataaacacggcagccacgataaaatagaataaaatgatgggagattccccctctctctgaactgtcccatattacattaccaaatatttattaaaaaagatagaatgcaaattgaaaaatcgccaccagcaccagggtttgactacttttcaacaagaatatccaagccgtcagcttcctgatcaataaaagcggttttcggtgcttttatcagcttgagagccagcaggaaatcaggcagacagtagccggcgtgaatgcccgagatcatgcagaaataatgagcgtgattcggaaatgccagtgctgcgtaaaacaataccggtgtaatcagcaagaacgggctgacgagtgaaatcagcattgttgtttttggtatacgtttccatgtgcgcatgcgcaatatggaaaactttttttctatttttctttttttgcagatgattggcaggacatggatgactttatgtgcaaataaaataacgacgagcaaaccgccgaataaagatacatattcatcgcttaagcttgtgccaggccgcagcagctcaaaagctaaaaaggtagatataaaaaccaaaatcataaaacatacagcagttaatattatgcgaacggcgccataatccttcatgagatttatggtcttccagcaattcatcaaagtcatccttccatacatcttgaatagaatctcaaaataatttactcctcccaagagaaaaaatcaatgcttttttaagaaaaaatatcatccggcaggtatttttttgaaacaagcaaacaaactgcgaaatatggggttagaactttcttctcagtgaattatcagctaaaataagattaaagatagaaagaagtggtgtggatggattcgatggatcatcgcattgagcgattagaatattacatacaattattagtgaaaacagtagatatggacaggtaccccttctatgcgcttctcattgataaagggctgagcaaggaagaaggggaagcggttatgaggatatgcgacgaattgtcggaagagctggcaacacaaaaagcgcaaggatttgtaacctttgataagctccttgcgctttttgccggacagctgaatgaaaaattagatgttcatgaaacgatttttgccctgtatgagcaggggctttatcaagagctgatggaagtctttatcgacatcatgaagcattttgattaactgtttacaggttcaagctcttcagccggttcatccgccgcactgtcctttgcttttttcttcagttttccgtttacgctttcaaagtcattgtcaatattggtgagtgacgtttcgaaaatttccataaaatcatcgccgtagatatggcgtatcatacacatcatttctgccacttcaggaaattttccgaataaatgatacaaaggctgtgaccctttaaaaacagcgttgcgtgtcggatcaaattcctcaagcaagctccagaatacctcggtaccttcctcagtcaattggacatatgtgttccgtttatcattcagccgtttggagaaccttaaatatccccgttcttccagcttttttgaaaagttgaatgcggttgatacgtgcatgaccccgaacttcgcgatttcagaaatggaagctccattcaattgatacgcaatccataaaatatgatgctcattaatattcaggtcatacggtttgagccattgctgccaatccttctcgatcgatttccaaagagctttgctaagctgagccattttctgggtgaaaaccagagcttctttcacatcatagggcggttccactcgattcattacgtcacctgcttctctttttctttttctctattatgccaataaaataaagattaataaagatgaaaatgtaagaattttttaataaattcacaaaccattgcgacgaaagggtttttcggccaaaaaaaaatacgggtccaattttggcccgcatttttttcttttgaataggatattagttttgtaaggttttctccagctgtctgattttctcttcgatatcggcaatttctttttgcagatcctgctggtgaggcttgatctcttcctgccattttttaattgacgtttggagctcgccgcccacgtctttaataacatccgtgctttcttttgccgctttgatcagctggtcttttaatgcaagcccgtctgactttaagcgtttgattgtttcttcaaaagaatcataattggttttcattttttcacgcagctgctttcctgaggaaggtgcagtaagaagaaccgctgctcctccgatgatgccgcctacgaatagtcctgttaatagagaacgtccgctcgccattacaatcaccccgtctttttcttcaaaataggattcattcagcatttttcatttttgttgaaagcctgaacttctatacatagcttgctttattttagcatattttttaagtgaaaaggagggagaaggttgtctgtctttttgattgtattatcctgcatcacccttgccttcgcttcaggcgctgtttactatatcaaacttctcagccaggctgcttcttatccgcccaagagggttatccggcagaaagcgcttgtttgttcaaccggaaccgcctttacactatgtcttatctttttcacaaaactcctcgcttaaaacatgctgacatgctgcgggcgctctgttcaaaaaaacctctcccggaagcggaagaggttttgtgtgacaattatttagcagcttccataaagcttgaacgccttaaaatggtttgcacaatcggataaataatgatcattgagattgtattcagcacagcggccggcagaacaacagccgcgaacaatgcggcgaaaccgcccggtaaaccgacgatcaataaagctgacgatagaaacacaattcctgataagatggtcccgatcactgtcagcacagcggctgcacctgttttccggctctttctgaacaagagaaacagggagaagaacagaaacgctgatacgggtttatcaatgatgttagggatctgtccggctggaaacgcggttgtaagcgcggaaatgattccggtcacgatcccgatgacgagtacattttgcacccgcgggaacagcagaatgcccatgaacatcatgatcagcatcatatctggtttcatgccgcctaaaaagggcggaataatggaatgaagcgctgcgccgatagcggcaaacagagccataatgactaactcttttgttttcatatctatgctctcctctgctaagcttttgccctccaataatatgctcatcatttattgcgaaggctttacagaatgtgttatgcaaacagtataccaaacgaacggtttgcatagccagactttttactcattttcctgctggaatttcttcatgaacgcagctaatttttcacagtcttcgagagagaccgcgttataaatagaagcgcggcagcctcccaccgaacggtgtccgccaaggccgatcatcttcgcatcttttgctttctggacgaatgttttcgttaattcgtcatcccgaagcgtgaaggtgacattcatgcgtgagcggctgtcttttctggcatgtcctttatagaagccgttgctttcatcaatacagctgtagagaacctgcgctttttgttcattgcgctgttcagcagtttccacaccgccgttttccttgagccactccagaacaaggctcagcatataaatcgcaaatgtcggcggagtgttgtagagtgaatccgctttgacatgcgtggaatatttcaggatttttgggacgttcgcattttcatttttcagccagttttttttcatgatgactacagtcacgccggaagggccgaggttcttttgggcgcctccgtagatcacgtcaaatttagacacatcgatttttctgcttaaaatatcgctggacatgtcggctacgagcggaattggagaattcggaaactcctgccactgagtgccgaaaattgtattgttggatgtgatatgtaaatatgcgccgtcttttacatccgtaaggtcaacctctggaatatagctgtaattgtctgtttcacttgtagcggtgatagacgtgttcccgaacaatttcgtttctgccagtgctttttcagaccaagcgcctgtcatgacaaaatgtgcggttttttcaggtgttaaaaagttcatcggaagcattgagaattgaaggcttgccccgccttgaagaaacaagatatcgtaatcttccggaatgcccatcagttcgattaagaggcttttcgctttttggtgcaccgcttcatactctttgctgcggtgggaaagctccataatagacatgccggattcgttaaaatcaataaattctttctgtgctttttgcagaacttccagtggcagcgctgcaggacctgcgttaaaattcgttgtacgttccattatgatctctccctgttttccacgttaatgtataaaataatacaattatcctatcacaaaaattcagttttttgataaaaaattagaattatcaaaagaaattgacggatgtttgcgaaatgttcacaaaataaaataacctcatcttatgatgaggccaggcgttttgcgatagaggaagagatgttctgcagatcctccggtttataatcatcagcatgcgttttccaaaccgctccgaatccatctccttttccgtagcgagggataatatgcatatggtagtggaacacagattgtccagctttttcgccgttattgttcagcgtatttaagccgatcggttcaaattcatcccggatagcgcgggcgattttcggaacagcatggaaatattgttttgctaattcatctgtaaattcatatacattctcaatatgtgttttcggaatgacaagcgtatggccttttgtcacttggctgatatcaagaaaggcaagtacatgttcatcttcatacaccttcgcggatggaatgtcgccggcgataattttacaaaagatacaattttctgcacaatgcatgagggttcctccttatgaaattgtttagtatgtatacactcatcgtaccacagaaatgcagaaaatagaaaacaggatgaacggcgagcgttcaccctgaatgcagaggaagagcttatatgaagaaaatgtgttatgcctttggtaagcacctcatttgtcaataaaatgaagacttgtttaatgcctaacgattcctgcgataaacacctcatttgacaatttgcttcatacatgaagaattcatcaattcagtgaagagaaatggtttgagcattggacatgtttattttctatccaactgtttctaagacgtctttgacaaacacctcatttttcagttgatatgcttttcctctacaactattatgatgtccagaaccctgtctctttatgacagcaaattcatcatttgttaaaagggaattgtttcaaatcaggccttgtttttggtactatgaagaaaaacactataaggggagaaactatgtctctgctatcggtaaaagacttgaccggcggatatacaaggaatccggttttaaaaaacgtatcattcacccttgaaccgaatcaaattgtcggattaatcgggctgaatggtgctggtaaaagtacaacaatcagacacatcatcgggctgatggacccgcataaaggttcaatcgaattaaacggtaaaacgtttgctgaggatccggaaggctaccgttcacaatttacctatatacctgaaacacctgttttatacgaagaattgacgctgatggagcatcttgaactaacagccatggcatatggactgtcaaaagaaacgatggagaaaaggctgcctccgctactaaaggaattccgaatggaaaagaggctgaagtggttcccggcccatttttctaaaggaatgaagcagaaggttatgattatgtgcgcatttttggcagagcctgcgctctacattattgatgagccttttctagggcttgatccgcttgccattaacgcgctgcttgaacggatgaatgaagcgaaaaaaggcggggcgagcgtgctgatgtcaacacacattttggcaacggcagaacgctattgcgattcgtttattattttacataacggcgaggtgcgggctcgcggcacgctgtcagagctcagagagcagtttggaatgaaggacgcggcgctggacgatttgtatcttgagcttacaaaggaagacgctggccatgaataatatgcttgatatttggcagtcgcggctgcaggagcatatcaaagaaacaagaacatacatgaaatatatgctcaatgatcacctcgtcattgttttgattttttttctagcgggcgctgcaagctggtacagcaaatggatacgggacattcccgctcactttccatccttttgggtgatggccgtgctgttttcgctcgtgttgacaagctcttatgtgcgaacgcttttgaaggaggctgaccttgttttcttattgcctcttgaagcaaaaatggagccttacttgaagcaggcgtttgtctacagctatgtgtctcagctgtttccgcttattgcgctgagcatcgttgcgatgccgctttatttcgcagtcacaccgggggcttcgctcgtatcgtatgccgcggtctttgtccaactgttgctgctgaaagcgtggaatcaggtaatggaatggcgaacgactttccaaaacgaccgcagcatgaaacggatggacgtcatcattcgctttgcggcgaatacactcgttctttattttgttttccaatctgtttatatgtatgcgcttctcgtctatgtcattatggctgtcctttatctgtatatgtcttccgcagcaaaacggaaaacatttaaatgggaaagccatattgagtccgaattgagacgaaagcagcgtttctatcggattgccaacctgtttactgatgtgccgcatttgcgaaagcaagccaaacgcagagcttatctcgactttttgctgcggcttgtgccgtttgaacagcgcaaaacatttgcctatatgttcacccgcgcctttttgcgttcgagtgattatttgggcattcttgtcagattaacgatcgttttcgcgctgatcattatgtatgtctcagctagcccgttgattacagcggttttgactgtgtttgccattttcattacgggcattcagcttctgccgctcttcggccactttgaccatctggcgcttcaagagctgtaccctgtgaaaaaagaaacaaagctgaaaagctatttctctctattaaaaactgcacttagtattcaagcgctgctgatgtctgttgcatctgcctatgcagccggcttgaccggttttctgtacgcgctgatcggttctgccgttctgatttttgttgttttgcctgcttatatgacaaccaggctgaaaaagcacggaaagctgtgaactgaaaagaggtaatcaaatgacagataatcagctgctgatgcaggaagctttggaatggaaaatgcattttttgcgaaaggattccatgtttgaacgcttttcgaagcgtgtgcagacgaaggtgaatgaacggattcctgaaaaaatccatacggtcgtcaccgagagtgtgaaaaaaatggtagaagcgacaatgaccggctccaatatcatcacttataaaaaggatacaagtgcactgtcgctcagtgaaaaaaatgaattggcgaaaaaaacgattgtttcttatcagaaagtgggagctgctgagggagtcggcaccggagcgggcggcatttttttaggcattgctgattttccgctgctgctttcaattaagatgaagtgtttatttaccttgtcttccatttacggctttgatgtgaaagatgcacaagaaagaatgttcttgctgctcgtgtttcagcttgcgttttcgagtgatgatggccgtaaatcgcttttttctgtcatcgaaaattgggagacggagaaaaagagcatcgactggagagtgttccagcaggaatatcgcgattatatcgacgtcgtgaagctttttcagcttttgccgggcgtaggagcggcagtcggcggaattgccaattataagctgcttgctcagcttggagaaacggcaagacatgtttttcatctgaggatattaaaggaaacagccggagaataaacactccggctgtttttttatagctgatgataggtgatcgcagcgccggcaaggaccttggccgctgtcagcatggctttttcgttgatatcaaatttcggatggtggtgggaataaactcggtctggctgttcgggagcggcacctgtaaagaaaaaagtgcctttcacgttttgtaagtaataagcaaaatcctcgccgcccatttgcggttcaccttcaatgacctgctgaacgccctcggtattctttgcggtgctcaccaagtggctcgtttcggcaggatggttcacaaccgccggataaccctgttcataggtgtactcataggacgcgccgtgcatgctgcatattccttttacaaccgctttaatttctttctccagaatgtcccggacattttcatcaaaagaacgtgctgtgccgatgagtactgcttggtctgcgatgacattaaacggattgtctgcgatgaaggaacctgtcgaaatgacggcggattgaatcggattgactttgcggctgacaatgtgctgcaaagaggtaacgatttgagaaccgattaggacggcgtctttagtatcatgcggatgagcgccgtggccgccctttccgaagactttaatcgtaaatcggtctgccgccgccattacggcaccggggcggcaaagaatggttccgagcggctcagttgcccaaagatgagtgccgaatatcacatccgcgttttcgagacagccgtcatcaatcattggctttgcgcctcccggataatattcttctgcatgctggtggatcatcacaaatgttcccttcagttcatgtctgttttggtgaaggaccttggccactgcgagaagagctgcggtgtggccgtcgtggccgcatgcatgcatgacaccaggcactttggaggcgtaagggacatctttttcatcttgaatggggagagcgtcaaagtcggccctcaaagcgactgtagggccgggttcgcttccttctatatatgctaaaacccctctgccgccaacgtttgtgcggattgggactcctaacgattcataataggaagcaataaatgcggcggttttttcttcttgaaatgagagctcaggatacatatgaaaatggcgcctgatctcaaccatttcttcaaaacagccgtcgagctgtttgtttatctctttctgcagtgtggatatggacaaagccgcttcccccttttctatgttttccatgattgtatataaaaagtctgaatatttcaactcatgctgttttaaagcatcatcacagctgcgagggttgtcaccaaaaggccaatcgcgacgggaatgaagttttttctggcaagctcaaaaggatcaactttgcaaatggccgcggcgggaatcagcgcccatgggactagtgttcctccgcccacccagatggcagagatttgtccgagcgcggtcagaacggcgggatcggcatggagagcggacgaaaagagctttgcgatggagccggcgagagaaatgccagaaaatcctgagccgtcaaggcctgttatggctccagcggcagttaatgcagcggcggcaagctcctttgacataggcatcatatgggataaagcaatgccgagatcgttgacaatgccgtgggaacctttagggagtgaagtgcccagtatgctctcatagcctgagtcgccaagataaaagaaagcggcaatcgggatgacggggccgaaaaccttaaaaccgaatttaaatccgtcaataaaatagccggtgattttttcaagccctttatgcttatacacgaaaaaatgaacggtaaggaggatacagattgcagacccgccaattaacgcggtggcatcatttccttgtaggttaaacaagagcatacaggcgatatctgcaagaaaggcaagcggaatcaaaaaagccagtatggaccgcaggcgttttggtaagtacagcgagttgtcttgttcgccggaaagaacgggggaaaaagaagcgggatgctcctgttttttgcgttcgcgctgaatcatgataaaggcagctgttgttgttgtcacacccataatcagcacaagcggaatgctggccgagacgacatcaccgactggaatgcctgctgcatccgcagtcagctttggcgccgcctgaatgacaaagtctcctgacagggcaaaaccgtgtccgaataagttcatggccatggccgcggcaagaggcgtcaaaccggcacgtgcggctgcggggagcaggacggcgccgatcaaagcgacacccggagaaggccagaagaagagagaaatggcgaacatcaggcctccaatcagccaataggcagtcacaggccctctcacaaggcttgcaaagggagaaatcatcgcttcatttatccctgtttttgttaacaaatcactcattgaaacgataaagcaaatgatgaaaatcgtgggcagcagttcgccggccgcatagataaagctgtggaataaactgctgacagaagctgaaagtgaatggctggcccatagcgatatgataaaaatgccgaatagagaaataaatgtcgtgtcttttctcagcagcataaataggataattactccgataaaaaacacatacagaacatggacagacaaaatcccgacttccatcatcgatcactccttccgcttacagattattcataggcgggcggaaggtgccgggacagaggggagggttatgatggaagatgaacattgatctgtttcagctgctcatcagatgatgccttaatactctattcgctttttgcagatgttttgggaagcattcaggagaaaaaatgacgcacccttcagcaaaccagttttttctataggcgatgatgctttccgatggctctaaatatgaatcatcctcgtgctgcatctcgtaatcatcaaatccgaactgaaaaccgcagcacgggcagatttcatgagaatgattgccttcatgatcatatggcggttcagtcaatcccttaaacccgcagactgggcaagtatgcttcattttgctttcctcccaataaaataagctgccggacatgccggcagctattcgacagcgaaatatgtggtgacataggaaggccgggagaagatcgacgttgtgtcaattccggcagatgtatcgcgttttttgtgggcttctttgtaagaaccggactgctgccagtcttgaaaggcgctttccgtttcccacaaggtcagaatgacataggtgtcactgtcaagcggacggagcactcgaattgcttcaaagccaggctcgttttcgacttttcccgctctgtttttaaatctgttttcaaacagcggacgtccttcctgagtgacggcaatattgttcaatactgcaaaaccgggatgtttgatctctccgacttggtcaatgacttcataagcgtgtggtgcctggaaaacggtatctccgtttgtttcatgaatcaaaatggcgttttcctgcccctgcatcaaaaggatattttctgagggatgcttttctacgatcgtttttaaaaaatcggctgtcccatatgtaatataaaccttcatatcagccacctcctgcttgctagtatatcaaaacaatggtataagtttctattggcgagtgcttcgaacataattccaaacaatttttcccatactacctttagaaaggcgaggtgagttcatgtttaagataaagaaaaagaaactttttatacctatcattattttagtgttaactgcttttctcgctttaataggatatatttcaattatttttctcggccattatgtcatagatgaaaagaagctgatacttcatgcttcttcaaaaattgttgatcaaaacggagatgaggttgcaagcctgtatacagaaaatcgtgagccggtctctatcaatgagattccaaagcaggtcagagaagcgtttatcgctgttgaggataaaaggttctatgagcatcacggcattgatgcaaaatctgtcggaagggcagtgtatcgcgatatattagcaggcggaaaggtggaaggcggaagcacgatcacccagcagcttgccaaaaatatttttctgacacatgacaaaacgtttctaagaaaaacaaaagaagtgatcattgcgattaatcttgaacgggattacagcaaggacaagctgcttgaaatgtatttaaatcagctttacttcggacatggggtttacggcatacaagcggcgtcccactattattttaataaagaagtaaaagatttgactgtatctgaaggcgctgttttggccgctattccgaaggcgccttctacgtactctccaattttgcaccctgataaaaataaggagcggcgtgatacaattctaggtatgatgaatgaccaaggctatatcagtgcgaaagaggctgtcaccgcacagggccgaacgcttggactgcacgtgaagaaacagtcggaaaccccttggtttgacagctacattgaccttgtgatcaaagaggcggaagacaagtattccatttccggagagcagcttcttcaaggcggatacacgatcaaggtgccgctcgattcgaagctgcagaagacggcttaccaggtgatgaaagagggaagctattatcccggaacagatcagaatgccgagggaagcgcggtatttattaataacaagacaggcggtgtagaagcggccatcggcggaagggattacacatccaaaggatataaccgtgtcacagctgtccgccagccgggttccacatttaagccgcttgctgtatacggaccggcgatgcaggaaaagaaatttaagccatattctctattgaaggatgagttgcagtcctacggagattatacgccgaaaaactacgacagcatgtatgagggcgaagtcactatgtctgacgccattacgtacagcaaaaacgcgccggctgtctggacgctgaatgagatcggcgtcgaaacaggaaaatcttatttgaaagcaaacggcattgatatccctgatgaaggccttgctctcgctctaggaggcttggaaaaaggcgtttcgccgctccagcttgccggcgcgtttcatacatttgccgcgaatggaacgtatactgaacccttctttatctcgagcataatagatgaagacggagaaacaatagccgattataaagaagaaggaaagcgggttttcaacaagcagacgtcttggaatatgacgagaatgctgcagcaggtagtcaaaaagggaacggccacgtccggcacctatcacggcgacctggcgggaaaaacaggctctacatcttatacaggcgtctccggcgcgacaaaggacgcctggtttgcaggctatacgccgaaaataaccggggcagtctggatgggctatgacaaaacggatcaaaaccattatttgaaagccgggagctcatacccgacgcggctgtttaaggatattttgacacaggcaggagaaaccggtcatgtgttcacaaagcctaaaaacgttaaagacctggaaagcccgattgagctgaagccggtcaaaacactcacagccgattacacatttaaagcagcggggctctttactattgaattaaagtgggacgctcaagaggatgatcgggccgtatacagaatttatgtaaacaaggacggcgaggagacgcttcttgattcggttgaagggaagggaagctatgaaattccttatgccaacttattttcgggcgcgtcttataaaattgtgccttataatacacagacaaaaagagaaggggaaggaaccgattacgttcagccgaaattgttttcctcttaatggaattcggcgattttttgaactttgagctacatttctataccatttgcctaaaacaaggtatagtgtaataagtcaagaaatacgaacgtatggttgccgtatgaaaggtggaaatcagatgagtaaacgagaaacgtttaacgagacgtttttaaaagctgcgcggggagaaaaagcggatcacacgcctgtgtggtatatgagacaagcagggcgctcacagccggaatatcgcaagctgaaggaaaagtacggattgtttgagatcacacatcagcccgaactttgtgcgtatgtcacaagactgccggttgagcaatacggagtcgatgctgcaatcctttataaagatatcatgacgccgctgccgtcaatcggtgtggatgttgaaatcaaaaacgggatcggtcctgtgattgatcagccaatccggtctctggcggacattgaaaaactcggccagattgatccggaacaggacgtgccgtacgtgcttgagacgattaaactgcttgtcaatgagcagctgaacgtcccgctcatcggtttctcaggtgcgccttttacgcttgcaagctatatgatcgaaggcggcccgtcgaaaaactacaataaaacaaaagccttcatgtacagcatgccagatgcatggaatctgctgatgtccaagcttgccgacatgatcatcgtgtacgtgaaagcgcagattaaggcaggcgcaaaagcgattcaaatctttgattcgtgggtcggcgcattgaatcaggcagattacagaacatacatcaaacttgtgatgaaccggatcttttcagagctcgcaaaggagaatgtgccgctgatcatgtttggcgttggcgcaagccatcttgcaggtgattggcatgaccttcctctcgatgttgtcgggcttgactggagactcggcattgatgaagccagatcaaaaggaattactaaaacagtgcagggcaacctggacccgtccattttgcttgcgccatgggaagtcattgagcagaaaacgaaggaaatacttgatcagggtatggagtcagacggcttcattttcaatcttggccatggggtatttcctgatgtcagtcccgaggttttgaaaaaactgacagcatttgtccatgaatattcacaaaacaaaaaaatgggtcaatattcctaagcatatcttttggtatcttaatgatatcctgtcaaaatgtttgtatcagatcattaaagagggtgtaaacagtgagtagaaagaaaatggggcttctcgtgatggcgtacggcacgccttataaggaagaagatattgaacgttattatacacatatcagaagaggcagaaagcctgaacctgaaatgcttcaagatttgaaagacagatacgaagcgattggcggcatttcaccgcttgcccaaatcacagaacagcaggcgcataatctggaacagcacttgaatgaaattcaggatgagattatgtttaaagcgtatatcggactgaagcatatcgagccgtttattgaagacgccgtagcagagatgcataaggatggcattacagaagcagtcagcatcgtgctggcgccgcatttctccacgttcagcgttcagtcctacaacaaacgcgccaaagaagaggctgaaaaactcggcggcttaacgattacgtcagttgaaagctggtacgatgaaccgaagttcgtgaaatattgggttgaccgagtgaaggaaacatatgcgtcaatgcctgaggatgaaagagaaaacgcaatgctcatcgtatccgcacacagcctgccggaaaaaatcaaagaatttggagacccgtacccggaccagcttcatgaatcggcgaaattaattgctgaaggcgcaggcgtttccgaatatgctgtcggctggcaaagtgaagggaacacgcctgatccttggctcggacccgatgttcaggatttaacacgtgatttattcgaacaaaaaggctatcaagcatttgtatatgttcctgttgggtttgtcgcggatcacttagaagtgctttatgataatgattatgaatgcaaagtggttactgacgatatcggcgcaagctattaccggccggaaatgccaaatgccaagcctgaatttattgatgctttggcaacagtcgtattaaaaaaattaggacgttaaagaaggcgatgaacatgagtgacggcaaaaaacatgtagtcatcatcggcggcggcattaccggtttagccgccgccttctatatggaaaaagaaatcaaagaaaagaatctgccgcttgagctgacacttgttgaggcaagtccgagagtcggcgggaaaatccagactgtcaagaaagacggctatatcatcgaaagagggccagactcatttctggaacgaaagaaaagcgccccgcagcttgttaaagacttaggtcttgagcatttgcttgtcaacaatgcgaccggacaatcctatgtgcttgtaaaccgcaccctgcatccaatgccgaagggcgctgtaatggggataccgacaaaaattgcgccgtttgtttctacgggtctgttttctttgtctgggaaggccagagctgcaatggatttcatcctgcctgcgagcaaaacaaaggatgatcagtcattgggagaattcttccgcagacgtgtcggagatgaagtggtcgagaacttaatcgagccgcttctatcagggatctacgcaggcgacattgacaagctcagcctgatgtcgacatttccgcaattttaccagacggaacaaaagcatagaagcctgattctcggcatgaaaaaaacaaggcctcaaggctcaggccagcagctgacggcaaaaaaacaagggcagttccagactctgtcaaccggtttgcagacccttgtagaagagatcgaaaagcagttaaagctgacgaaggtgtataaaggcacaaaagtgaccaaactcagccatagcggctctggctattcgctcgaactggataacggcgtcacacttgatgctgattcagtaattgtgactgctccgcataaagcggctgcgggaatgctttctgagcttcctgccatttctcatttgaaaaatatgcactccacatccgtggcaaacgtcgctttaggtttccctgaaggctccgtccaaatggagcatgagggcacgggttttgtcatttcaagaaacagtgactttgcgatcacagcctgtacgtggacgaataaaaaatggccgcacgcagcgccggaaggcaaaacgctgcttcgggcatatgtcggaaaagctggagacgaatccattgtcgatctatcagataatgacattatcaacattgtgttagaagacttaaagaaagtcatgaacataaacggcgagccggaaatgacatgtgtcacccgatggcatgaaagcatgccgcagtaccatgtcggccataagcagcgtatcaaggagctgcgtgaagcacttgcatctgcgtatccgggtgtttatatgacaggcgcttctttcgaaggtgtcggcattcccgactgcattgatcaaggaaaagctgccgtgtctgacgcgcttacctatttattcagctaaaacctccgctttatcgcggaggtttttttgatgtgcaatggcaatattgtgtaaaaaaatgattgaattgaacggcaggttatgatacatttgcatatgtacttaatgactaaaatgttcaaacggtcagtttcgaggtgaatacaatgtcaatagatcgaaaaaagctcattttggaggcggctacaaagtctttcacgcagttcgggtataaagcgacgacaatggatcttgtcgcaaaacttgcgaacgtggggaagggaaccatttatacttttttcaaaaacaaagaagagctgtttgacgagattttcactactttattaaaggaaatgaaacaaaaagcggatgaagcgatggagccgaaccttccgttccatgaaaatgtgcacagagcgctgtttgccattctggagttcaggaaaacacatcagctgacgattaaaattttccaagagaatgccgagattggtacaatggctgttcaggaagtgatccagaaaatggagcgagccatactgtcttatatcaaaagtaagattgaagacgggatcaaaagcggcgcaatcaagccgtgcgaccctgaactgacagcctttgtgatgctgaagctttatatcgcgctcatttttgactgggaaaaacaacaccccccgcttgataaagagacaattgcgggactgcttgaattgtatgttgtcaaaggattgtcagcgaactagataatcctttctctttgcaagaaaatgaccatttttcatgatgagtcagttttagaatggaggcatcaggatgaacacaatacgaagtcagtggaaagacatcgtaacaagtaaaaaattattgattcccatcatcgccattttgtttgtcccgcttatttacagcggcgtattcttaaaggcttattgggacccgtacggcacagttgaccagctgcctgtcgttgtcgtcaaccaagacaagggagcaacgtatgaaggagaaaaacttcaaatcggtgatgatctggtcaaagaattaaaggataataacaactttgattggcatttttccaatgatctcgaccaatcgttaaaggacttattgaatcaaaaatattatttagttgtcgagattcctgaggatttttctaagaatgccagcactgtattagacaaaaatccgaaaaaattggatctgaaataccatacaaatgcaggttctaactatgtaggggcaacgatcggcgaaaaagcgattgataaactgaaagcctctgtttcaaaagaagtgaccgagcaatatacgaaagttatttttgataactttaaagatatcgcaaaaggtttgagcgacgcgagcagcggcgcgaaaaaaattgatgacggcacaaaggatgcgaaaaacggaagcgcccagctgaaagaaaatctggcgaagctgaaggaaagcaccgctaccatcagtgacaaaacagcgcagcttgcagatggagcggctcaggtgacgagcggcatccaatcgcttgacagctcgctcggtaaattccaggacagcagcaaccagatttatgataaatctggccagcttgcagcaggatcaggcaagataacgggcaagctgaatgaactgaatgccggccttcaaaaggtgcagcagggcttgcctaatctgacaaacgggctggatcagctaaacagtaaagcgcaagaaggttctgagaaagcatcaaaagcggaaaaacttataaatgcgctcgatttaacgaagcttgaaacagctgtgaataacctcgaaaagtcagaaacagcgatgaatgaatttaaaaaacagctgtctgactttgaaaacagcttaaaaaaccgtgatcaggcatttaaaaatatcatcaactccagtgatttcttaacagcggagcaaaagagccagctgatcagctctgttgaaaagcagcttccgaaagttgatgcgcctgattttgatgaaattttaagtgggcttccttcagctgatcagctgcctgacatcgcaacgataaaaagctcattggaagatgtgaaagcgcaggttgcccaggtgaaggcattgccggaagctacctctaaactttataacggcgcaaaagccactcaagacgcgattgacaaattaactgctggatctgagaaattatacaatgcgtcacagcaggtgacagatggccaaactaaactgacagccggcatcggtgaatataataagcagttcgcaaaggcaaaagcgggctcagagcaattggtgacaggaagcagccaagtatccggcggattgtttaagctgttagacgggtctaaacaggtccaaagcggatcatcaaaacttgcagacggatctgcatcacttgatacaggtttaggcaagctgttggacggcacaggagagctgtctagtaagctgaaggatgcggctgaccaaacaggagatatcgatgctgatgatcaaacatacggcatgtttgcggatccggttaaaaccaaagatgatgccattcattccgttcctaactatggaacagggctgacaccttatatcctgtcaatgggcttatatgtcggcggcatcatgctgacggttgtcttcccgctgaaggaagcgtcagggcgtccgagaaatggttttgagtggttcttcagcaaattcaatgtcatgatgcttgtaggaatcattcaatcattgattgtggcgacggttcttctattgggaattggtctcgaggtagagagcacgtggagattttacgtgtttacgatcattacgagtctagcttttctagcgataattcaatttttggctacaacgatgggcaacccgggacgatttatcgcagtcattattttagtgctgcagctgggagcgagcggaggaaccttcccgttggaattgcttccgcatttctatcaggtcatccatggcgcattgccgatgacctacagcattaacggattcagagcagtcatttcaaacggtgactttggctacatgtggcagatggccggcgtcttaatcggcatcgccctcgtcatgattgcactaagcattacttactttacaatgttaagccggaaggaagaaacatcagaagaacagccggcttcataaagaaaaagaacttgtttccttggaaacaagttctttttttgttacattccccatttaataagcaatcctgtataggttaatccgccgccaaacccgaaaagcaaaacgatttgatcttttttcagcttcccggctttcactgcgagatcaagcgccaaaacaattgaaaccgaagatgtgtttccgtagtgctcaacactagtgagcgttttttcaatcgggaacggtgttttttcacaaattgactcgatcatgcgcaagttcgcgctgtgaggaacaaaccaatcgagatcatcagagctgagtcctgctttatgtaaaagccgttcaaattcgccagggacagttcttgcggcccatttatatacctcgcgtccgttttgcaccatttttccagaaccgacaagctgcacaccgtttatttcatttcgcagtccggcacgatacaaaatatcgccgccgttcccgcttgttccttgtacagacgcaagaaatcccggcgtttcttcatctcgttctactaacagcgcacccgcggcatcgccgaacagtacgcatgtcgttcgatcggtataatcggttacctttgataacgtctctccggcgatgacgagaattttttgatgaaggccagatgtgatcaatccatttgccaaatggaggccgtatgtcagcccggcgcatgtcgcattaatatccagcgcgccggtgctttcccagccgaaatattcctgtacgcggcatgccgtactcggaaaggcgtaatcggatgtggttgtggcaacgaggatcatatcgacatcatcaagcgttcctttataacggctcttgagattcttcaccgcttctatgcataaatcagaggtaaattgatgttcatccgcaatccggcgttctctcattcctgtgcgctgaacgatccattcatcagaggtatcaacgatcttttctaaatctgcattggttaaacgtctgctcggcgcataggtgccgatagctgtaatttttgcttttgacatatgaatcactccttatggtcagattataacactagatattagtatctggtactaaaaagaaggtttttttacaaaaaaagagaagtgtagataggaatctatgaaaaagaaaaaggaggctgaaaaatggtcagtcaagaagcagtagtctttttggcattatccggggctattgcgtttctgttgccaatcgggctgattgtatggtttaagcgaaagtatggtgcctcgcttaaagtgttttttattggcgctctcacgttttttgtcttcgctcagctgctggaaggcggcgttcatgtttatgtactgcaagtgaatgaaatgacgaaagaagcgatgcagcatccattatggtatggcatttacggctgcttgatggccggaatttttgaggagtgcggaaggtatatgatgatgcgattttttatgaagcgccatcatacttgggcggatggtctggctttcggggcaggccatggcgggcttgaagccatcctgattacaggcttgtcctctatctcacttattgtatacgcatttgcaatcaatagcgggacgtttgaacagcttttggtcaatggcgacgtcaaacaggcgcttttgccgatacaggagcagctgctgcatactccttcgtatgaatggatgctgggcggaatagaaagaatcagtgccattgccgtccaaattgggctgtctctgcttgttttgtacgcggttaaaagccgccggccgctgtttttgttgtattctattcttttacatgcactgtttaatgtaccggcggttttatatcagagaggaatcatagagcatgctgctgctgttgaaatcattgttgctcttatagcggctttatcagtttattggattgtaaaagcaaaaagggtgtttcaataaaaggtccaagcagcagcaatgcccgcttggaaaaatgtgaatggaaatattcattaagcgtgggtcatcagaatatttctgattcagtctttagcaatgacagcaagaatgtctgtgttttttacaagagaaacaatggtgtttctttttcttcttctcgcaagggtcatggcattctttctttttcttgcaatggtcgtggaaatctttatcgaaccactcgtcaaagaaccaaaaatcatcgaaccaatcgtgacaacgacatttctgttcatgtgaatgacgacagcacatagaaatccctcctcttcccatgctctctacagcatatgagagattgataggaaaagattggacgggtccctcgggaaaagagtatattttaagtagaaaataaaaggaggaatgccctatgacgtccgtacgtaaaacgatggagctcattaaagaacttgtatcgatcccaagcccgaccggaaatacatatgaggtgatcaattatattgaaagccttttaaaagaatggaaggtagaaacggttcggaaccacaagggcggcttaattgcaacgcttccaggacgcgacacatcccggcatcgcatgctgactgcgcacgttgacaccctcggcgctatggtgaaggaaattaaagcggacggccggctgaaaatcgatttaatcggcgggttccgctacaactcgattgagggagagtattgccaaattgaaaccgcctcaggaaaaacgtacacaggcacaatcttaatgcatcaaacgtctgtgcacgtatacaaagacgcgggaaaggctgagcggaatcaagagaatatggagatccgcctagatgaacctgttcactgccggaaagatacggaggagcttggcattggcgtcggagactttgtgtcgtttgatccacgtgtcgagatcacatcaagcggatttattaaatcgcgccatttggatgacaaagcaagcgtcgccttattgctccgcttaattcatgaaattcaaacagaagacattgagctgccgtatacaacccattttcttatttccaataatgaagaaatcggttacggcgggaattcgaatattcctcctgaaacagttgaatatttggcggttgatatgggcgctatcggtgacgggcaggcgacagatgaatattcagtatcaatctgtgtgaaggatgcgagcgggccgtatcattatcagctcagaaagcatttagttcaattagccgagaagcatcatattgactataagcttgatatatatccgtactacgggtctgatgcgtcagcagcgatcaaatccgggcatgatattgtgcatggcctcatagggccgggaattgacgcttcccatgcatttgaacgcacccataaatcatctcttcgccataccgctaagcttctgtattactatgtacagtcaccaatggtataagggggaggaccaatgaagatttataagctgaaaagcacattcggttgggaaggtgatgacgggttgggagaacagctgattcagcagatccttgccggagaaaaaaacgccacgtgcgcgccgaaatcattgtattcaaaagatgaattgagggacgtttatcaaacagcgggtcagcttgttaccgtttatgataaacatgacaatccaagatgcaatataaaagtaacagatgtctttgaaaccacctttggtgcgcctgatatgaggttagtcaaaggagagggcaatggagaccgaattgaggagtttcaagaggatcatcggatggcatgggcggaactgatcaaaagcggtgaactggagctgaatgaggatactgttttgattacagagttgtttgtgcttgttaaagattaaaaaagcctgcggggcaagaaccccgcaggcttttcattaaccagaaatggttgcgttttgttctgttttcgattgggacataacagtttctgctttcgcaggattaaacatgccttcccatttagacatcacaacggcagcaagcgcgttaccagtcaggttgacaactgtacgtgccatatccatgatgcggtctacgccggcaataaaggcaagtccttcagccggaacgccgatggtgccaagcgttgcaagcaagacaacaaaagaagtaccaggcacggcagccatccctttagatgtcaccattaagacgagcacaagcgtaatttggtgccaaatcgtcaaatcaatgccatatacctgtgctaaaaagagtgcggcaatagattgatagagaacggaaccgtctaagttaaacgtgtaaccgatcggaatgacaaatgaaacaatgccttttggacatccgattttctccattttttccatgatacgaggaagaaccgtttcagagctggacgtactgaacgccagtaagatttcgtccttcatgtaagcaaggaacttgaagatgctgatgccggcaatttttgcgacaatcccgaaaataacaattaagaagaaagcaagcgcgacataaaccaatccgacaagctttccgagagagataagagaaccgagtccgaatttagacacagtcactccgataagagcgaaaacgccgaatggcgccactttcatcacaaggtttacaacgtggaacatggcatgggatacaccttcaaaaaaggctaatacaggcttgcctctttcaccgatcgcggaaatacccaatgcaaatagtactgtaaagcagatgatggctagaagatccccttcgaccaatgactggaagaagtttgtcggcacaatatggaggaacgtttccgccactgatttattactttgttctttttcagtttcaacatattgactgatgtccgatttttgagcttcgtgtatattaactcctgtacccggatggaagatgtttgcaagggctagtccgagaataatggcaaaagtcgtgatgatctcgaagtacagaatcgttctgaagcctaatttaccgacttgctttccatttcctgcaccggctacaccgatgattaagctggagacaacaataggaatcactatcattttgattaagcgtaaaaagagatccccgattggctgcaggtaagtaggcaatgctgggttgccataccaaatgacgccaacaatgacacctagaataagtccaacgaatatttgtgtggctaatccaaacttaattcttttcatagattacctcccaaaaaacaaagtatcaacatatatcatgaatagacatatatttaatctcactattagatcaaattataatagataagaaatcaattcgtctatagtaaattatatttcgaaaataaagaatattcaatgacattatgataatcaccagaattatctaaaaacaggtgagctttgacctaacctgactattatttcaaaattaagagatatgtgaaaaaataagaaaatcccacgcgtaaggcgcgggattttcgctcattacaaatcgtttacttttatacagtcattgcagatattaccataacactcatgctgctcttctatcttttttccgcattccgcacactttttcgaaggcaggtttctaaaaaattctgtgattttccccagcataaccaatccctctttcccctttgtagtgatttcattgtaatataacagatcgcaaaaatcaataactgttttgatacaatgtttaaaacatgcttttttcaagaaaaatgggtatattgaaggaggatcaattttttttgaaaagataggaggacattatgaaagttacagttatcggatgctatggcggttttccggccgcaaatgaagcgacgtcaggctatttgtttcagtcaggtgattactctctgcttgttgattgcggcagtgccgttttgtctaagctgttcggatatgtgccggcggaaaagctggatgcggtcgttctgtctcattatcaccatgaccatatcgctgatatcgggccgctgcaatttgccaagcaagtcggttcgtttctcggcaaaggagagcatacgcttccgatttacggacatgatgctgatatagaacagtttcaaaagcttacatataaaacacatacaaaagggatcgcctatcagccggatcagccgttgactgccggtccgtttacgatcacctttttaaaaacgattcacccggtgacgtgctatgccatgcggattactgacggcagccacactgtcgtttatactgctgattccagctatcaggattcatttataccgttttcgaaagatgctgatttattgatctcagaatgcaatttttatgccgatcaagacggaacaagtgcaggccatatgaacagcctggaagccggacgcattgcaaaagaagccggagcgggagaactgctgctgacacatttgccgcattttggcgtgcatgacaatcttcgcaaagaagcgaaaaccgtttttaacggagaagtgaatattgcgaaatcaggttttgtgtgggaaggataaaggaggagcaccatgttatttatagacaatcaaaatatcaatgatccgcggatcaatcttgctatcgaggagtactgcgtaaagcatttagaccctgaacagcaatatttgctcttttatgtgaatcaaccgtctattatcattgggaaaaaccaaaatacaatagaagaaatcaatacaaaatatgtagaggaaaacgggattatcgtcgtccgccgtttatcaggcgggggcgctgtgtaccatgatctggggaacttgaacttcagctttattaccaaggatgacggggacagctttcataactttaaaaaattcactgagccggtgattcaggcgttacatcagcttggggttgaagctgaattaagcggccggaacgacattgtagtggatggccggaaaatatccggaaacgctcagtttgcaacgaaaggccgtattttcagccacggcaccctcatgtttgattcagccattgatcatgttgtatcagcattaaaggtgaaaaaggataaaattgaatcaaaaggcatcaaatcgatcagaagccgagtagcaaacatcagtgagtttctcgatgataaaatgaccaccgaagaattccgcagccatttgcttcgccatatttttaacacaaacgacattggaaacgtgccggagtataagctgacggaaaaagattgggagaccattcatcaaatttcgaaagagcgctatcagaattgggattggaactacggccgctcgccgaaatttaaccttaatcattcgaaacgttatccggttggatcgatcgatttgcgcctagaggtcaagacaggcaaaatcgaggactgcaaaatcttcggagatttcttcggtgtcggtgatgtatctgaaattgaaaacctgctggtcggaaaacaatacgaacgcagcgtcatcgctgatgtgctcgaaggtgtgaatctcaagcattactttgggaacattacgaaagaggatttccttgatctgatttattaaggcaaaacacatcgtttgaaagagcggttgtgtttttgaaataatggaggcaggagggattcacatgaaagtgtttttaatcggagcgaacggacaaatcgggcaaagactcgtctctttattccaagataatcctgatcattccatcagagcgatggtcagaaaagaagaacagaaagcgtctcttgaagctgccggtgcagaagctgtgcttgcgaatctggagggcagcccggaagaaatcgccgctgcggcaaaaggctgtgacgcgatcattttcacagccggttccggtggcagcacaggctatgataaaacactgctggtggatctcgatggagcggcgaaagccattgaagctgcggacattgccggaatcaaacggtttattatggtcagcgccctgcaagcccataaccgtgaaaattggaatgaggcactcaagccttattatgtggccaagcattatgctgataaaattctggaagcgagcggtttaacctatacgattatccgtccgggaggccttcgcaatgagcctggaacgggaactgtttcagcagcgaaggatctggagcggggatttatttcccgtgatgacgttgcaaaaacggtcattgcctctttagatgagaagaatacggaaaatcgggcctttgatctgacagaaggagatatgccgattgccgaagcattgaagaaactatgacagtactgacactcagggctttttgctcttgagtgtttttttctgtttctctataatggaggagaaagcttggcttcaataatgaatgactattcattcactttaaggggtgggagaatgaatcttgtttcaaaattggaagaaacagcatctgagaagcccgacagcatcgcatgcaggtttaaagatcacatgatgacgtatcaagagctgaatgaatatattcagcgatttgcggacggccttcaggaagccggtatggagaaaggggaccatctagctttgctgcttggcaattcgcctgattttatcatcgcgttttttggcgctttaaaagctgggatcgtggttgttcccatcaatccgttgtacacgccgacagaaattggttatatgctgacaaatggtgatgtaaaggcaatcgtgggcgttagccagcttttgccgctttatgagagcatgcatgaatcgctgccaaaggttgagctcgtcattttatgccagacgggggaggccgagccggaagcggcggatccagaggtcaggatgaaaatgacaacgtttgcaaaaatattgcggccgacatctgtcgctaaacaaaatcaagaacttgtccctgatgataccgcggttattttatatacgtcaggaacgactggaaaaccgaaaggcgcgatgctgactcatcagaatttgtacagcaatgccaacgatgttgcaggctatttgggaatggatgagagggacaatgtggtctgcgctcttcccatgtttcacgtgttttgtttaaccgtctgcatgaatgcaccgctgatgagcggcgcaactgtcttgattgagcctcaattcagtccggcatctgtttttaagcttgttaagcagcagcaggcgaccatttttgccggtgtgcctacaatgtataactacttgtttcagcatgaaaacggaaagaaagatgatttttcttccatccggctgtgcatttcgggaggcgcggccatgccagtcgcgttgctgacggcgtttgaagaaaaattcggtgttaccattttggaaggctacgggctctcggaagcatcacccgtcacgtgctttaacccatttgacaggggcagaaaaccgggctccatcgggacaagtatcttacatgtcgaaaacaaggtcgtagatccgctcggacgcgagctgcccgctcaccaggtcggcgaattgatcgtgaaaggccccaatgtgatgaagggctattataaaatgccgatggaaacagagcatgcattaaaagacgggtggctttatacgggggacttggcaagacgggatgaggacggctatttttacattgttgaccggaaaaaagacatgatcattgtaggaggatacaatgtgtatccgcgggaggtagaggaggtgctgtacagccatccggacgtcaaggaggcggttgtcatcggcgtgccggacccccaaagcggggaagcggtaaagggatatgtggtgccgaaacgctctggggtaacagaggaggacatcatgcagcactgtgaaaagcatctggcaaaatacaagcggcctgccgccattacgtttcttgacgatattccgaaaaatgcgacggggaaaatgctcagacgggcactgagagatattttgccccaataaaatgaaaaagcgaagcggttagcttcgctttttcattttcaatcctttgcttcttttttaataatatttagcagcgcctttgtatcatttttgcttaatttgtagtatgtgccatccttcaaaaaaacggcttgctggctgccgtcaatccatagtctgaatgagtcataccggtctttatgaaacttgattgtcccttcgtaatcaggggctgatgttttttctgtcttcacctgttttccctgattcataatatccagcatatctttgacgtgctgtcttttttcaatctcgatatcttcctggccgcttgaagacagtgtgatcaaatccgcgtctaccgattgatacacatcgcctgatcggctgtaaagataaaaaaatgcgataaacacaagaccgattaccacgatggctgccactatttttttcatttgcatcactccaaacattgttagttttcccagcgatcgggctttccatgcttaaaagggtggaaaagtgcggaacacagcttggttctaagaatttgaatttatgattacaatagaagtaacgggttgatgtgaggagtgaggcgttatgcgcaagtggattgcggcagcaggacttgcttacgtgctgtacgggctgtttttttattggtattttttcctgtcgggtgattccgcaataccggaagccgtgaaagggacgcaggctgatccggcttctttcatgaagccgtctgagttggcagtggccgagcagtattcgaatgtcaagaattttttattttttatcggggtaccacttgattggtttctgttttttgttctgcttgtcagcggtgtttcaaagaaaatcaagaaatggatcgaagcggccgtgccttttcggtttttgcagaccgttggttttgtgtttgtgctttcgctgattacaacattggtgacgctgcctttagattggataggctatcaagtatcgcttgactataacatttccacacagacaacggccagctgggctaaggatcaggttatcagcttttggatcagctttccaatctttacgctttgcgttctcgttttttattggctgatcaaaaggcatgaaaaaaaatggtggttatacgcctggctgttaacagtgccgttttcgctgtttctgttttttattcagccggtcattatcgatcctttatacaatgatttttatccgctgaaaaacaaagagcttgaaagcaaaattttagagctggcagatgaagccaatattccggctgaccatgtatatgaagtgaacatgtcagaaaaaacaaatgcgctgaatgcctatgttacaggaattggggccaataaacggattgtattgtgggatacgacgctgaacaaacttgacgattcagaaatcctgtttattatgggccatgaaatgggccattatgtcatgaagcacgtttacatcggtctggctggttatttgctcgtgtcgctcgccggattttatgtcattgataagctttacaagcggacggttcgcctaacccgcagcatgtttcatttagaaggacggcatgatcttgcggcacttccgctgttattgcttttgttttctgttttgagctttgcggtgacgcctttttctaatgctgtctcgcgttatcaggagaataaggctgaccagtatgggatcgagttgacagagaacagagaagccgctgttaaaacgtttcaggatttggccgtgacggggctgagccaggttgatcctccggtgcttgtgaagattttcagaggcagccatccttcgatcatggaacggattcaacatgcggagaaagaagagaatgcgccggaacatcaggatgctgacaaataaaaagaagcaggtatggaggaacctgcttctttttactattattgtgcagctgcttgtacgttgattaacccttttccatagtagaaagagtttccaagatatgttgcagtgctttctaaacgatcacggacttgcgcgtttgtccaagtcgggtgcttagaaagaattagcgctgctgctccggcaacgtgaggagtcgccatggacgtgccgttgtaagcaccgtaagtgcctccaggaagtgtgctttggatggatacgccaggagccatcacatcaagctcagaacctgcgcttgagaatgaagctctttggttgctgctgtttaccgcacctaccgcaatagtagaaggatattttgcagggtagccgactgtgcttgagcttccggacgaaccttcgtttccggcagcggcagcaacgacgataccgctggaaacggctttatcaacgactgttttcagcgctgtagaaccagaaggtccgccaaggctcatgttaataacatccatattgttggaaatggcccattcaatgccgttaataatccagctatattggccgcttcctgttgaatcaagcacttttactgcatataatgatgcgcttggcgctacgcccagaacaccgattgagttattaagagcggcaatcgtaccggctacatgcgtaccgtgagaactgccgtcctggtatgggtttgtttcagaaggtacgaagcttgctccgcctctgacgtttaagtcaggatgagaagagtcaattccgctgtcgataacagctacttttacgttagagcctgtgtagccttgagagtgaagagccggcgctttaatttgagaaatgccataaggaacagattgcgcatattcatgtgcaatatgatcttcttccacatatgcaacgctcggatcttttttcaattcttttacagctttttcatccaatgttgctgcggccgcgttaacatacttaaattgcttttgaacctttccgcctttttcagaaataacatcctttttcttggcggaactcatggcactcattgtctgtttaaatccgacaatgtatttcttttctgtactgctttttccggcagcctgcgcagacatgttgctgaacgccatcgtaaagattaacgttaacgcaaacaacaagctgatccacaattttttgcttctcactctttaccctctccttttaaaaaaaattcagagtagacttacttaaaagactattctgtgaatttattgtaatagatggaataatattttagtagacccatttttttgagatgattttatctctatttaggtatatcatctctcgctatttccgtagagactcgaaataactattttcatacagaaaagaacgaaaatagacatgagtaaatgttcattatgctgaaatgtcatgcttttttaggttaaatgctcctgagtcccggcaaatttctgtcgaaaaaattcgttcaaatgacctgcgtgtgcttccgtgagaacaatggatattatcgtgatattttttcaaagcatgatgataaaagtattctgaaaaataaactttacagaaaagggatagaatgaaaaaattattgagagggaggaagaaataagatgaacattcgccaagcaaagacatcagatacggccgccattgcgccgttgtttaaccaatatcgggaattttatagacaggcatccgatttgcaaggggcagaggcttttttgaaagctcgtttggaaaatcacgagtctgttattttgatagcagaagaaaatggagaattcataggctttacccagctctatccaacgttttcttctgtgtcaatgaaaaggatatacatattaaatgacttatttgtcgttcctcatgcacgtacaaagggagccggctgccggctgctttctgccgcaaaggattatgcagaggaaaacggggcaaaatgtttaacacttcagactgagcaccacaaccggaaggcaagaagcttgtatgagcaaaacggctatgaagaggataccggatttgtccattattgtctcaatgtgccggcgaagtgaaaatggcggcttgatgatttggttttttgaacgttcttcggttacgatataaatgaaaaggagtgtgccgaatgtcaacgttatttcaagccttgcaggcagaaaaaaatgccgatgatgtttcagtccatgtgaaaaccatatcaacagaggatttgccgaaggatggtgtcctgattaaagttgcttattccggcattaattacaaagatggtctggccggaaaagcaggaggcaatatcgtcagagagtatccgcttattttaggcattgatgctgcgggtacggtcgtctcttccaatgatccgcgttttgcggagggggatgaggtgatcgcgacaagctatgagctcggtgtctcccgtgatggcggattaagtgaatacgcttcggtgcctggtgactggctggtgcctttgccacagaatctttcgttaaaagaagcgatggtgtacggaacggcgggatttactgcggcgttatcagtgcatcggcttgaacagaacggtctgtctccggaaaaaggcagcgtgctagtcacaggagcaaccggcggtgtcggcggaattgcggtatcgatgctgaacaagcggggttatgatgtggtggcaagtaccggaaaccgggaggcggctgattatttgaaacagcttggtgcaagcgaagtaatcagcagggaagatgtctatgacggaacgcttaaggcgctgtccaagcagcaatggcagggagcggttgatccagtcggcggaaaacagcttgcctcgcttttaagcaaaattcaatacggcggatctgtcgcagtgagcggcttaaccggcggaggagaagttccggcaaccgtgtatccttttattcttcgcggagtaagcctgctcggaatcgattcagtatattgtccgatggacgtcagagccgctgtttgggagcgcatgtcttctgatctcaagcctgatcagctgctgaccatcgtggacagggaagtatcattggaagaaacgccgggtgcgttaaaagatattttgcaaaatcgcattcaaggaagagtgattgtgaagctttaacaggatcagcttgcagagaatgttatttttctgcaagcttttttgtggacaggatgatcagctgctgaactgctgtgtcgcgaaacaagattttcctgtaagccgaactttctcttctcattttaaaaataattggtgataatgattctcattccgtgttatactactcttggacatcttaaccatagaaactaccaacaggagagactggaacatatgaaaaaaacactgattattcttacagttttacttctttctgtcttaacggctgcttgctcgtcttcaagcggcaatcaaaacagtaaagaacataaagtggcggtaacacatgatttagggaagacaaatgtgcctgagcatccgaagcgggttgttgttcttgagctaggttttattgatacactgcttgatctcggcattacgcctgtcggggttgccgatgacaacaaagcgaagcagctgatcaacaaggatgtgctgaagaaaattgacggctacacatctgtcggcactcgctcacagccaagcatggaaaaaatcgcttcattaaaacccgatttaattattgctgacacgacccggcataagaaggtgtacgatcagctgaaaaaaatagcgccgacgattgcacttaataatttaaatgctgattatcaggatacaattgacgcttcgcttacgattgcaaaagcagtcggcaaggagaaggaaatggagaaaaagctgacggcgcatgaagaaaagcttagcgagacaaagcagaaaatcagcgcgaacagccagtccgtgcttttgatcggaaatacaaatgataccattatggccagggatgaaaacttctttacatcgagacttttaacacaggtcggctaccgatatgcaatcagtacgtcaggcaatagcgattcaagcaatggcggcgactctgtgaatatgaaaatgacactggagcagctgctgaaaacagatccggatgtgatcatcctgatgacaggaaaaacagatgacctcgacgccgacggtaaacgcccgatcgaaaagaatgtcctttggaaaaaactgaaggcagtgaaaaacgggcatgtataccacgtggatcgtgcggtgtggtctctgcgccgcagtgtagacggggcgaatgccattttggacgagcttcaaaaagagatgccggctgctaagaaataaaagaaaagacaggcaaacgcctgtctttttcttatttgataaagccggataagtggctgttgatattatagtcttttatccgccatttttcttctgcaaattcaatgttgctgaggcaggcgttgacgagacgggtgctttgaagctccgggtcaccgccggatatttctgtcagcagggcgtgaattgccgcaccgtgcgccacgatcagcaccttcttgtttggatacgcctgattcacttttgccaaaccgcccatcagcctgtcagtgagttcttctaaggtttccatattcggatagatgttatctggatagcgctttgtccgttcctccagcggcatgccctccgcgtcgccgtaatcgcgttccttaaaatcatccatctcgactatcggaagatgcagatattcattaataatttccgcggttcttttcgctcttttcagcgggctcgtcacaataatatcccaagaaaagtcctttacatattctccggtttctcttgcttggcgttcacctgttgcgtttagcgggatatcggttttgccttggcatttttgctgcaggttccaatcggtttctccatgtcttactaaacaaacggctgtcataaaatccccttcctgactttattcatatcgctattatactaaatcgaaagcgtgtgtcctatgaaaaagcctatgcaagaacttcaaataataaagcaagtccaattccgccgccgcttccgatggctgcaaccacatattgacagtctgtccgtcttttcgcttcataaaacaatctggttaccagagctgcacctgatgcaccgtacggatggccaagagctaaggcgccgccgcgcacattgatttttgaaaagggaatgccgagttcttgcgagcagacacaaattttgacggcaaaggcttcattgatttcaaataaaccgatatcctcaggtgttacatcgtgtgtatgtaagaggttacggatcgcatcaaccggtgccgcgggcggatagttggggtgaatcccactgactgcgctgccgataaaccggagcacaggcttaagtcccagggctgccgctttttcttcttccattaccaaaagagccgctgctccgtctgctatgccgctgctgttggctgctgtgactgttccggagctggtgtcgaaaaccggctttgcacggggaataatcgcttctattggccgcgttttcaaaaatgcttcgtccgtctccaattccccgagaggaacaatttcttcacggtaaaatcctccatcatgcgcgttcctgctgcgttgatggctgagaagggcgtactcatcctgcatgcttctgctgatggaatagcgtgcagccgtatattctgccgcaatgcccatgtctggatcgccgatggcatctggagaaaagcgggcccgttctgaaaaaggggattggctgctgctttctgagccgcccgcgatatacatcgtgccggctcccgcttgaataaggctgcaggcatagcgcacagcttcaaggccggagccgcactgtctgtcaattgtcattccgggaactgataaaggcagtccggcttgaagggctgacagtctggcgaggttgccgcctctgccggtagcgtttccgagaatgacctcgtcaacttgatcctctagctttcggctgagacagcggatgatgggagctgacaaatcctccggcaggaagggcttcagcagtccgttttgatttccaaagatcgttcgttttgcatcaacaataaccgcattcatttatactgtatactctcttccagccattttttcactctggaacgggcaatttttccgctgctcgtttccggcaagctgtctgcaaacacccattttttcggaattttataggaggctaatttctgtttacacaaggctttcagtgttctggcattagcgtttccatgaatgacagctacagcgatttctccccaatactcgtcgggaatgccaacgacagccgcgctttcaacctctgggcaggcgagaagcacacgttcaatttcttctgggaaaatatttaatcctccgtacacgatcatcccgttttctcttcctgatatgtatagaaagccctcttcatcaacatagcccatatcatccactgtcatccattcatctggtgtgctgccgttcacatagccggaaaaccgcatcgggctgttgacaaatatttttccgacttcgcctggctgacagcgttctccttcagcgttgcggatttcgatccggacattatgaaaagggcggcccgctgaatgcggtttccgtttgctgtcttccggtgaagaaaacgtcacaaaactaagctctgatgtgccgtaaaaatcgtacagcttgagatgaggccatgcagcggcaagcttctccttggattctgccggccagtctgcgccggatgaaatgattttgacgggactgtcgggaaaaccctcaatccttgtgagggcgtctgtcatcgtcggtacggtatagagaacactgatggattcacggcacagccattccttcgctttggcaggagaaaactttttcagcaaacaaacggttcctccgagaaacaaagtgctgactgccccgtataagaagtgagaggacattaacgtcccgggaatcaataccgtgtcatttgatgtaattgaaaaatctgtttctgtacaggtaaagctctctatccatgagcggtgagatcgcgtgaaggccttcggttttcctgtcgagcccgacgtaaatcccatataaaaagggtgctccggatcaatggtaggcaagggatcagcggttgcttcagaaatatctgccatacagttatccagcaaaacaacaggtgtctggctatctgtcagtttgtttttgaaaaaggctaaagtaaccacaagatccgcattgcttatggacagccgctccttacattcagccgggctccagcgtgtgtcgatgggaatggctgtgcaaccagccgctgcggctccggcaaacagctgtaaaaacgccagactatttgggagcaggatcgccacacgattcggcatgctcggctgtgaccgcagccaatttgcggtttgagagacaagccgatcccaatcctggtacgtgatttgctccgattcagtctggatcgctacacggccgggcgatgtttcggcagtagatgaataggtatgagtaattgtcatgtagtgtcatcctccttttgtaaacatcgtatcagaaagagacaaggcttgagtgatttttatcgccagaaatgcagatacagccgcttttatcaaatcaccaggcacatatgcaaggctcatgaaggcggcctgtgacaaatcaatatgcatgataaaagcttgtaccggtataccaagcagataaataaagatgatgccgaatacgatatgagtgaaaaagagacgcaatactgtcaccttccgcagcctgttagcggctaaactgatcagccatgaagcgaggggataagcaatcaaaaagcctgcgctcggtccgaaaaacacaccaaaaccgcctcgtccgccgggcaacagcggcgctccgaaggcgacgagcagcaaaaagacaagctggcttaagatagcagactttggcctgagaatgctgcctgccaacatgacaccaagcgtttgcaatgtaatcggaacgggtgtaaaggataagaagagagggggcataaagccgagcactgccatcagcgcggtgaaaatcgcaatatgcatcatgtcgattaatttcagcatgtgaaatcctccaaacagtaatcaaatatggttatacaataaatgccggtaattattatgtcaactgatttttgatttaagtttacataatgaacgcaaaaaaaccggccgtatggcagaccggtttttgatggttattcttctgtcaggatgacaagcgaatcaacggaagcggccacatgggaaacggcgcggctgacttcctgaagccctccaagaaaggcttgcagatcgacgtcgattttgcctgattgctctttgctgattttcatgctgtggacgatttcatcgaataagcggttaatttgcgtcattttttctttactttcgctgactagctcattcacgtctttgatatgcttggatacaatgttgatttgtgtattcgtattgttcacaagctcagaaacagtagagacggtttttttcgtgtcctcagaaagcttccgcacttcatttgccacgacagcaaagcctttgccgtgttctccggcgcgggcggattcaatagatgcattgagcgagagaaggtttgtttgttcagctatgcctgtgacgatgccgaagattttttcaatttgctgcgcgatttcatccagcttgaccatttctttttcgatttggacaaggcttgtgtcaattttgttcatctgtttttgctggacttctagctctttttttccgccgatcgacttttcttcaacagtgctggatgttacagtgccggctttggatgcttgagaaatgccttcagatttgtccacaagctcttgaactgatctgcttgtttctgaaaacagattggcaatcgatccagaggtttcttgaattttctgatgaagaaggtttttcttttcttcttgttcatcacgggtctggttgtactcgctttgaaacgcttcaaggacaagctgctgttctaagttcaagatttttgttgttgctttaatggcttttagcagttcttgctgatttgtaatggacgcttcataaatgtcaatcattgacaaaagaagctcttgaaacgcacccatataccattttggcaaaaggccgattcttaaatggatggaggcgattcggttacgcttttcaataaattcatcatcgataacgcctgcaaacatttcctgaatatgccgttttaacgtttgttttaagcggtcaactgagctgtgatcattaatgatatccatcaatgagctttcatggtcaaggtttttataaaacgcatcaacgatatttacgatattttcttgaatgagtggctgaagctgctctaacacgtaaagctcagcatctcccaacctgaccattttgagctgttttttgacatctgcatgtttgtttgtgagctgaatgcggtttttttgctgtccgtttgaatctgaaaagtaagctgtttcttgttttctgtcttttttaaataacaatacaatgatcccccttgggaaaaatataatttttactttttggctttttaagcctttttcttttttatcggccaagggaaacatgaatgaagctgcagatgaaaaatatttgaaaaaacgttcattaaaatgaacggtttaatcgagatctatttgttttaatggtttaatggccggaccctctacaacttcgccagatggcttaaagcgtgatccgtggcacggacaatcccacgtatgctcactgtcgttccactcgacctcgcagcctaaatgggtacaagtcgtatcaacgagatggaggcagcctgtctcatcacgaaatgctcccgctcgcctgccgtttatggtgacggctttcccttctcctggcgaaatgtcttcaaattggacatcaggcttttcaagctttccttttatcaaatgcttggcgacatctgcattgtaggaaatcactttctgcaacccgggattcagatggaaacgggacggcgtgaaaatgctttcgtatgggttttcttttttctccacaaggtctgacaataaagtggctgcgactgctgaggacgtcatgccccattttttgaacccggtcgctactagaatattgtcctcattttccgacatcggcccgataaacgggattttgtcgatcgtcactagatcttgggtggaccaataatatggaatgctttcgatgccgatggtgctttcggccagttgtctcagtgtttcataatgtgtagacatggcttttccctggcctgttttatggcttactccgctgaagagaatcagcttttcaccgtttacaaccgtatagcggagcgccactgacggctgatcgatactcaaatacatgccctcgggatactcgatcttcggcttgatggcaaggacataagatctgtcggagtacattctcgcagcatataatccgcctccgtcataaaaagggaagtgggaacagcatatgataaagcggctcttaatggcgtgccggctttttgttaccacttcgggcctttcgccttttttgatatcaagcgcaacggtctcttcataaattcggccgcctttttgaacaatttgctccagaagcgcttttaagtattgaagcggatgaaattgagcttgattcttcatgacaagcgccagcttagaacctaagggaattggaagatccttgataaggtctctttcaattccgagctttgtgtatgcctcatgctcggtgtggattttttgaacagcgttttcatttgccgtataaagatatgcgtcttgctcggtccattcacaatcaatttgatgttcatccacaatgccttttatgtaatcaattgcgttttggtttgcttcataataaagcctcgcatggtttaatccgaaatggcggataaattcgtcgtatatcatgtcatgctgtgcggtaactttagcagttgtatgcgcagtggttccgttaagaacctgatttgcttcaatcaaaacgacacggaagcctctcttcgtaagttcatatgccgttgtgattcccgtaatcccgcctccgataatggtgacgtcacattcagtgtcctcttgaagcgcaggaaaagaaggcaggtcagttgatgttttccagtatgtttcaggtgcttcctttgcaaaatgttgattagccaagccgttatacctccaatcagatttattcttaatttttccatattctatcttttcatacataggaagcaggcattgttcataacataataaggttgaaaaggagtgatttcattggcgaatcaaaaaaagaaaacattaccgcctcagcaccagaaccagcagcctggttttgaatatctgatggacccgcgtccggtttttgataagccgaagaaagcgaaaaaattagagggcaaaaccgctattattactggaggagacagcgggattggacgcgctgtctcggtgttattcgcaaaagaaggggctaatgtggtcattgtgtatttgaatgaacatcaggacgccgaggaaacaaagcagtatgtagaaaaggaaggggtaaaatgcctgctgattgcaggagatgtcggggatgaagcgttttgcaatgatgtggtcgggcaggcaagccaagtgtttccatccattgatatattggttaacaatgcagctgagcagcatgtccagcccagcattgaaaaaatcaccagccaccagctgatcagaaccttccaaacaaacattttttccatgttttacttaacaaaggcagtgctgcctcatttaaaaaaagggagctctattattaataccgcttcaattaccgcctataaaggcaataaaacgctgatcgattattcagcgacaaaaggcgcgatcgttacgtttacaaggtccctttcccagtcgcttgttcagcagggcatacgggtcaatgcagtggcaccgggtcccatttggacaccgcttatcccggccagctttgccgcaaaagacgtggaagtgtttggttcagacgtgccgatggaacgcccggggcagccggtcgaagtggcgccaagctatctataccttgccagcgacgattccacatacgtcacagggcagacgattcacgtcaatggcggaacaattgtgaacggataataaaaagccaatccttgaaggattggcttattcgctctgcttgagcgctgcatattctttagagagcgtaagaaacgcatctttatctttttcgtccaaggctttgttaatttggtccgtcagcatggcaagccgacggttatacaaggattcatcgagcaccatttgaatgtaaatatccgtcattgtgacatcgaattcttttgttttttgcgtgttgcgggacttcatgagctcagtgtacgattttttctctttcataaagaatccccccaatgccttttttatagtatatggataacggtcgaaaaaatcaataaatttttataatttttagacaactaatacttggcaatctatcgacatatcctgcaaaatgccgtaaaccggcaagtcttatgaaagtaaaatcggtttattactagtcatttagtaccgttaaatatcattaaaagatgattttatcttaaatgttaaaaaaacctgtcgttttacaaaaacagatgatagattattagtataaattttgcagaaaaaggatggaggccataatatgagtcagaaaacagacgcacctttagaatcgtatgaagtgaacggcgcaacaattgccgtgctgccagaagaaatagacggcaaaatctgttccagaattattgaaaaagattgcgtgttttatgtaaacatgaagccgctgcaaattgtcgacagaagctgccgattttttggatcaagctatgcgggaagaaaagcaggaacttatgaagtgacaaaaatttcacacaagccgccgatcatggtggacccttcgaaccaaatctttttattccctacactttcttcgacaagaccccaatgcggctggatttcccatgtgcatgtaaaagaattcaaagcgactgaattcgacgatacggaagtgacgttttcgaatgggaaaacgatggagctgccgatctcttataattcgttcgagaaccaggtatatcgaacagcgtggctcagaaccaaattccaagacagaatcgaccaccgcgtgccgaaaaggcaggaatttatgctgtacccgaaggaagagcggacgaagatgatttatgattttattttgcgtgagctcggggaacggtattagaaaaataggaaggagctgaccgaacagggcagctcctttcataaagctatgccgtcggaattcctccggtgatgccatatacctgagatgtcacatagcttgaattctctgaagctagaaatacataaacatcggccaattccactggctgcccagcgcgatttaatggagctggcggcgtgccttgtccgaatttcgggatgttttccgtcggctgtccgccggaaatttgcagcggtgtccaaattggtccgggcgcaactgaatttactctgatgcctttggaagcaagctgttttcccagtccgacggtaaagccgataatggcgtttttcgttgctgcgtaatctaacagcatcgggcttggattatagccttcaactgaggtagttgtaataattgaagctccctccggcaaatacggaagcgccgcttttacaacccagtaaagggaaaagacgttcacttcaaatgttttatagatttgttcagtaggcagatcttcgatgttttcgaccgcttgctgtttgcctgcaacgagcgctagcacatcaagtccgccgagttcgtgatgcgactgtttgactagatcttggcaaaaggattcgtcgctcaagtctccggggatcagcactgcttttcggccttctgcttcaatcagctcttttacctcttcagcatctggctgttcctcgggcaagtagttaatagccacatcggcaccttctctggcgtaagcaattgcggcagcgcggccgataccggaatcgccgcccgtgacaagcgcttttcgacccgttagtttacctgatcctttgtagcttttttctccgcaatcagggacaggtttcatgttcttttgcaggcctggcggttcttgatattgttcgggaaattcatcatgaaaaaatgcttttataggattcgtaagatttgaatcagacatcagcaacgctccttttctgtttggtgtacattcgtatgtgtacccctgagcataagcagaaaaacatgttttggcagtttgaatagtgaaggaaaaagaaaacaagaaaaaacaaagccttcttccatatttatcttgtcaaataagactatatgaattatgataaattcgagctataaatcaactaaatattgggtgttgggagagtgaatcgtcatgaaaaaagcggcggcggttttgctgtcactcggtctcgttttcggtttttcatacggagctggccatgtggcggaagccaaaacaaaggtgaaggtctataagaactgcaaggagctaaacaaagtatacaaaggcggagtggcccgcacatcgaaggtgaaaaacaaaggcggaaaaacgaagtacaagccttacgtttctaaggcgctttacgatgccaataaaaacaaagaccgcgataaagatcttatcgcctgtgaacggtaaataagaaaaagcaatctggtgtccagattgctttttctattgcttaagccgcctgatcggccgcagcgcttttcgccttccttgtcataaggctgactgccatcatgaccgtgatattcaaaagcagggcgacgatgccgacattcaagtcttttgcggcttgcggcagagccggaaataaagtgccgatcgtcgtttccgtcattgtaatataagtaactgctccgacacctgcaataatgccggcgaaagctccttgctttgtcaccatattatgcttgagcaggctgaacaaaagggcggggaatagctgtgtgacaaggctgtagcccatcaaaagcagcgtaacgatggtattcccgcctttgaaggtaaaatacaccgaaatcagcgcaatcaccggcactaaaaacttagcaagcgccgatacttgctgttctgtcgtgcggggcgcgattaccttgtacacattttttgcaaacagtgtggaggcggacattaagatcatagaccctggcacaagtgctgtcagcagtccggcagcaccgataattccgacaaaccaagggtcaaatgcttgcagagacagtctcaaaagcgacaaatccccgtctgcgccattcagatctggaacttgcaggatagccgcaaagccaacgaaaagaacgaagagcaggaccagctggtacaaaggcatgatgatggcgtttttacgaaacacttttgggttttcggctgaatacgaagcggaaaacgtgtgaggccacatgtaaaaaccaagcgctgtcaagagtacggttgaactgaaccaggccacactttgtcccgattcggggagcgtaagaaagccaggctttgccgtttcaatctgctgaaacatgtcttgaaatccgccgtagtaatgaattggcaaatacacacctaaaaacagaacgacaaccagaatcatgatgtccttcacaaccgatatccaggcagacccgtgaatgcctgaaaccataacataaaccgtgatggaaacagcgccgatccagatggcggcggtcggggtgattttgccgtacgaggtttccgatacaatcagcccgaggcctttcagctgcagtacaagatagggaatgagtgcggcgatgccgaccagtgaaacgagaatgccaagcagcggactgttgtatttttttgtgaaaaaatcagactgcgacattagtttatgctgtttcgcgtacgtccaaactgctggaagaagccagtaagaaaggatgtaggccagacatccgtaggcgatgatataaaaggctggaccgccctttccgtaggcccagccgctgccgccgagaaacgtaaaagtagtataaatttcgcctgccatcaaaaggaagacgaacacagttccgaagccgcgccctccaaccgtccactgctccaggttcatgtcttttcctttttgggcgcgtataccgagaaaaatactcaagagcaggacaccgaaaatgatgatgagagctgcattcattctgcttcctcctttttattttccttgtcgaggacatacacaatcgccatcagcgcagaggtcaaaagagcccacatcacaatataggcaagaataaacggcatgccgaacacgtagggggtcaccttatttgcaaaagggatgccgagtaagataccgataaagggcaaagcggcaagaacgtgaatcagtttcatagaatcctccttctatttaggattggggtgtacaagcccaagcgtactgaaaatgatgtcgcagatatggcagcacatgtcactttttagggtgaaaggctgtggttcgaattataaataaatttattttgtttgtatagtgtgaattgtctgaaattaatgctctgaatcgcccgaagagggaacgggcagtatgattcaaaaggctcggagtctgtccggggcaaatagatagtatgttaataattcgctgacctgctcacggattcgcggattaaaatagcgatggttttcttcataaccgtcgatgacaaatgtatagagcgtaaaggcttcatcgcgttccgtctcgcggattgcaatttttcttttcctcagttcttttctgacctccatcaaatccttttgtgctatttttaatgattcgctgataagctgtttataaggatgcttcaattttaatgtgctttcttcaattccggcgagatcacggttaaaaatcgtaatggccatgggcaaaaagagagcccgttcaattaaatcgtatatttcctcctgcagatttggcatgttgactccttctttctaagggaacgtttgttctatttgtattctatatcggctggtgaaatgtttcaagacagaaaaaatcaccaaaactttttagttttctgctgataatgtgtagaataaggatagacaaacccggtaaggagtataaatgttggagcattttttatcctatttgacacaagaacatttaactgaattatttcaaagctatagggctttcggtccgctcatagctgtgctgctgcctttaattgaagcatttctcccgtttttgccgctgatcgtgtttgtggtggcgaatacgaactcgtttggcttgtgggaaggattcatcctgtcttgggcgggatcaactgctggttccattctcgtatttttgattgtccgtcaatacggacagagaaaattgcttggatttatccgcagtcatccgtctgtaagaaagctgatgttatgggtggaaagacacggcttcggtcccatgtttcttctgctttgttttccatttacaccgtcagccgcggtgaatgttgttgccggtttgtcaaggatcggaacgcggccgtttattttggcggcagcctcggggaagcttgtcatgatttttatgatcagcttcatcggatatgatctgcacgcgctgattacacagccgattcgaacggtcatcgccgtattggtgatcactgtcttatggtatgtcggcaaaaaggtggagcggtatctgcatgtaagagccagtcagcgtgagcatgatggagggagacagtaacatgaaaaaacggttttggtttcttgccggtgtagtgtccgttgttctcgccattcaggttaaaaatgctgtctttattgattacaaggtagaaggcgtcagtatgaacccgaccttccaggaaggaaacgaattgttggtcaataaattttcgcatcgatttaaaaccatccatcgttttgacatcgtcctttttaaaggccctgatcataaagtgctgattaaacgggtaatcggcttgcccggtgaaacgatcaaatataaagatgatcagctgtatgtgaacggaaagcaggttgctgagccatttttgaagcatttgaaatctgtttctgccggcagccatgtaacgggtgatttttctttgaaagatgtgacgggaacaagcaaggtgccgaaaggaaaatattttgtcgttggagataatcgcatatacagcttcgacagccggcattttggtccgataagagaaaaaaatattgtcggtgtgatttctgatgccgaataaaaagacgctaatggaagaggcgtctttttgtatgccgtttggaaaaatgtgttgaagaaaaatttgtaaggagctataatcaaaattgttacctgtgtaacaaaatttatatattttttgattggaggtccgtttttattggtttttgttcgttttgtatgaaacaaaaggagtggtgaatgatgatgaaatatgaagcagtgattataggaggagggccggtcggatttatgctggcttctgagcttgcgatggccggagtgggaacatgtgtgattgaacggcttgaaaaacctgttccgcattccaaggcgttgacgctgcacccccgaacgctggagcttcttgagatgagagggattttagagcggttcgtatccaagggaagcaagatacctaccggacatttttcaatgctggatacccgtctggatttttcaggcttggatacgagctgtccttacacgcttttgctcccgcagtcaaaaacagaaaagcttcttgaagatcatgcacgaagcctgggaacagaggtgtttcggggtgccgaggcgctggcggttacggaaaacggggaagcggtccaaacaatttttaaggatcgggacggcagtgtacggacgatcacaagcaagtttgccgttggtgcagatggcgccggaagtaccgtccggaaacaggcaaaaattgagtttccgggaacagacagcactgtcaccgctgcgcttggggatgtggtgctcctttctccgccgccgtcaggcgtgctgtccctttgcacaaaagagggcggtgttatgattgttccgttatcttcagaccgataccgtgtcgttgtgatcagtccttatcgcacacaaatgccgaaagatgtgcctgtgactgagaaagagctgagagctgatctcctgcgaatttgcggaactgacttcggtttaacagacccttcgtggatgtcgcggttcgggaacgccgcgcgccaagcgaaacggtatcgggacggcagaatctttcttgcgggtgatgccgcgcatattcattttccagcgggcgggcaaggactgaatgtcggccttcaggatgcaatgaacctcgggtggaaactggcggcggccatcaaaggctctgcgccttcttggcttttggacagctaccatgacgagcggcatccggcagcggaagggctcctcagaaacacggaggcacagacaaagctgatcgatttcactcaagcaggcctccatttgcgaagcatgatgtcggagctgctggccttccctgatgtgaatcgatatgtagcagggcaaatttctgcactcgatgtcagatatgaagctgatcgtaccatgccgccgaatcgtttgaacggggcacggctccctgacatgaagctgattctttccgacggcagttcggaatggctgtacagctttctccaaaacgggtcattcgttttgctgtcattgaggcaggaagctgatgagcatatcgaagtgaaaggcttacgtacggtaaccgcctcgcttgcagaaccgaatgaaaagttgcgggatgtgcataccatattggttcgtcccgatggacatgtagcctgggcggtggatgcatcagcgcccgattgttccgaggtgattcaaaaagggatcagccgctggttttccgtcaccagccgagtataattcaattcgattgtttcatctgtaacaaaacggtatgatagaagaaacaatcgaatgaaaaaggatggaaaacccgatgaacacagatcatacgaaacgcaatctttttgaattgtatgcggagctcattcatcaacaggagaaatgggaggggcttattaaagcctttttatctgacgaattgaggaagctggatgtagagcacgggagtaaatctcaattgacgatgacagaaattcatgttctatcctgtgtcggggacaatgaaccaattaatgtcacgtcgatagcagaaaaaatgaatacgacaaaagcgactgtatcacgcatcagcacaaaattgctcggcgcaggcttccttcacagaacacagctcagcgataataaaaaggaggtctacttccgattgacgcctgctggaaaaaagctgcacagtttgcacaaatattatcatcagaaggctgaacagcgttttctgtcattttttgaccgctataccgaggaagagattctttttgcggaacggctgtttcgggatctggtgacaaaatggtatccgtcgtcagaagaaattgaaggggggcttcctagcatttttaaataaaaaacacgcactgaggtgcgtgtttttcgcttttttctatcttgttcaaggctgtaacgtaaatcagatttcatcttgaagaatgaaattcaagatgttctggaatttgcactgcttatacgatatgtctattagtatctttattttatacgttttttactgtgtttttgatgctttgttttcaaatgaaatagggtcttctgttttagttctcctaatctttacagaaatacctactagaatgaccgccatagttgtaaatattcccatggttaataagatcgtatcctgatttaaactccatccaattaagaaagagatgatcgctcctccgaaacttgccgaagcaataaataaacttgtaacttcgtcaacgtacttctgaataatgattgatgctagtgttaaagcaatgggaaatatgcccgctatacttaggccaatcaaaaatgtaccgcccaattgaagtattgggttacttatataagagaaagcaatcaacaaaacaattaaacaactacagctaaaaaggaggtatttagaaaaatcaagccttctacttacgaaaccaatcaatattcttcctatgatgatccctacccagaaaaaggagacacttataagactaatttgttcattgtcttggtttatcatgattgaaggtaaaaagttggcaaaatttgtttcaattccagcatataggaaagcgaaaaatacaaaaaagcctaattgctttgatttttttctatctcctataaagtattgaaatgctcctccatctggaaaggtcacttgttggttagcattcttagcgtactctcggttcttagacaagaaaattaaccaccctacgaataggacgaataaaaaggtgaatatacagtaatacggtaaaaaccagttattgatatctatgaaggaattaattaataatgggaaagataaagcgcctaatccaaagagaacttccagcttactcattttttctgcattactttcgaaattagcaataacaaatgaaccaactgtcgtttctaatgtgcctgccccatatcctaagagaaaagccattacaacaatataataccaatccttagttagaaaaaagatacttaacgctgcaagcattattgtcaaagctaaagtaagtgtcctaaaatgactgtatttcttaatcattaacggtgcgattaatactccgcttagaaatccggtaaactgaaagaagattatgaccgaaatatcatctgttgtcttgttaaaagactctaatagaaatggtgtcaaactccctgttgatatatggataatgcctactgtaaaaaagaaagcatatccaaataaatatgtccctcttaacattcattacacccctatatgaaaaagcaggaaaataaattcctgcttttttagtaacttctctcttcgaaatactagttgactgctgaaacagacattggttgagagttgctgtctttctcaaagaacatttctaatacttcctgagatctaaaaccatcactaaaagaagggatctcaacccaatcattctgagttgatgcaatccaattgattaactcgcttctaaaagaatcagcccatccataaaactcgtttggcggatcgtttaataggctttgcggtactgggcagtctaccacgttcaagccatctatgagcttgtaaacgtgaggattacctgtgtggtatttaaactcttttttgtgtccaactacctcaatgctaaaaccacagtcttcaggtacagaacattttgatgtgatgatatttacaaataccttgttcttcagctggccataaatttctgcatagtcatctacgagtacctgtttatcctcttttgtttttacatttgtgttcatttttgccgttactgattctgtgatgaaatcactctcaaacaaataccataccatgtcaataaggtgaatacccagatcccccaatgatccactcgtcttcttactgttagcgtcatctctccaagtaaacttcttacgcctaagtgcactatttttcttgaagtgtacttttatggacagtatgttacctagttcattattgataattaagctttttaagatatttacgtaagataaatatctataattaaatcccatactggctcttacgctcaacctttcagcagtatctttcattatgcttgcttcttcaagagaaatagccataggcttttcacacaaaacatgcttatgttttcctaatgcttgcaaagcatgttctttatggcaaaagtttggtgatgctacaattaaaccttctgaggcatcaattagttcatctacgttttcaaatgacttcccgccgaaagttttcacaaagctttccgcattttgttgatttatgtcatatacccctactaactctgcattttttattgtagataaagcagttgcatgcgctcttgcaataccacctgcacctatgatgcctatcttcttcatttttatttcctcctcatgatccaattaatttttttaaggtattagtaattccttttgagtactcactatcagttataaggtggtgcaagttttttgcttcctgtgttgcattttttagcagatatccattccctactgtctgtaacatacgaacatcatttccactatccccaaatgcgatagctctttcggtatttaggttgtatttctctaacataaacgttacaatttcattctttcctgtccctgtggggataaaatctacatcatagctgtcttctggatcgcctgctaagggattacaccgatttatatttactgaaacgccgtattcctcgcagattttttcaattgctaataggtttttcttgtcgtttatttcatcttgttcctgatagtagaagttatgcttataccgtgactttcctaattgagtttgaggattcaaaagaatgttatgattttcatgtagctgtttcacaagtttttcaaccttttctttactaaacccttcattaatgcgactgttccacttgttatcttgctgaccgaagttatgctctgaaaagtacgtaatttcagttccaagatcactagctataaaatgcggaaaatatctaaattttcctcttcccattttatcgagaatagattctatactgctcccagtaacccatccgattattagcttcccatctttacttttttgttctagatagtcttcgagttcatagatgtcttgttgcttttgttcgtcgattgtatgcggaaaatacgtttcatcaaaatcacaaaaaacaatatactgaggatgttcaaccgtggataacgttttatactccgatttcttgcttaataacatgaaacagtccctccattactctgtcttgttcttctaaagtaaatgacggatataaaggcaaatgcagtacctgactatgagccttttccgtatgaaccaattggagtcctgcatacttgtcctgtactaaaggagttttttgcatatgagacagtattggataatatacatctgtttgaacaccaaaatcttcatttaatttagtcatgatatctgcccgatcttctgttcttaccttaataggaaacagatgccatacatgatcttcacttaattctggtaattcaatatagcctttattctgcaactctgctaattgggtaatgtatctatccgccaagaacaatcttttgaagttgtttaatgaaaggtacttcattctctctaaaccaattgctgcctgtaaattgtccatttttgaattaaatccaaaattgatgactttcttattttttacatttacttcaaaaccgtgataactaaattgaatgcattttttagcgagttcttcattatcagttgctattgccccagccttgccacatacaccaaaattcttatagggattaaaacttaatgtagtgatgtctgcatactttcctaagtctgtcagtccaattccttggcaggcatcttcaattactttcaatttataacgatttgcgatttgacgaatatgctgcatgtctgaatgttttccgtataaatgcacaggtagaataaactttgtataaggagttattgcttcttcaattttgtcaggatcgatgcagaatgtttgtgggttaatatctacatagataggaacgcctcccaaagctaacacagcattttcagtagctgaaaagctattagccggcatgataacttcatcccctgggtttaatcctaaagccaataaacctatcataatagcatcggttccactgctggttgcaattacataccttttatgtaaatatgtagataaaactttttcgaattgctctaaataggaaccactcgtaaattttccagttggcaaaacttcagttaatgtatttaagatatcttccacttcatcattggttattaatctgtctacaggcaaaaaagggactttactgatttcacgatttttttgatagttgaaaagatcatgttcaatatctatcttttcttttaatacttgtttccaccgctcgtttacaatactgtcttcaataacaagttcttttccttgtacgtcaccttttaagtgttttaatagtgacatgttttctttgcttttacctgaaatcttaacctgtttttgcatgaacagtacctccaatgattttataatctaaaaatttattacaaatttatcctagtttctgaaatcggtaacatgtcaacaacttttttaaggaagggaaaatatgcctacaattgatgaaatagcaaaattatgcaatgtgtctaaaaccacagtgtcaagagtattgaataatcatccttatgtgtcgaaagaaaaaagagatatgatcttaaaggctattaacgaacttgactacactcccaattatttagctcggaattttaggagaaataagacacaaacgatagctttatcggttccgagtatcgaccatccattttttgctcaattaataaaaggggtctctcatgaagcactgtttaagaattacaaggtaattgtatttcagaccttttatgacaaacagacggagctagaattactagagttattgaagcataaagaagtggatggcattattcttgggactttagaaaatgaatgggatcagatatcccctttcttaaagtatggtcctatcttattatgtaatgaatatcatcactcagcggacatcacgataattgggtatgatgaatttgaagctacatacatgggggtagtacatttaattgaaagagggcataaaaaaattgggttttgttttgatactccatatagcgaagctcaatgtcagaggaaagagggttatttgaaagctttacaagattacgatttacatcatagaagcgaatggatattcggcgaaatgtttaatatcgaggatggctttcgtgtttttcataagataaaggatctaaaggacagaccctcagcaatatttacaggaaatgatcaagtcgccgcagggattattaaacaggcgatgaaaaatggctttaaagttccagaagacttagctgtaattggttttgacaaccaattgatctgccaagtcgttactccgaccataacaacaattgatatccccgtaatagaattaggtcaacaggctgtgttgaaaatcatcgagtccatttcgggtaatgccactttaaacagaagaattattaaactgccaacaaagcttattataagagaatcaacgtaacgatagatttccctttatcattttatatctttatataagaaaaagaggttattcattttaacctctttttcaatcgtaagtcgtcaattatttctttcatttcaccctctggcagcattcacttcaaacctgatccattaacaacgaaatatccgcttatatttcctcatctcgatggtttgcgaattaaaagttcttgaacccttttttcaactaggcactactgccgctgattgagctctttttgtcttttttttcaccatgaagatggtgaagcaggcgataaaacggcggcagcagggcaataaccagaatgacgcgaatgacctgaaccgcaacgacaaaggtggaatcagcatgtaaggtaacagacgtcgtcgccatctctgcaatcccgccgggcgcaaatgccagaacagaagtgatgagcgaaattcctgtcagctcggaaacgatcacggcgctcaaaaacattgctgcgattaaaccgacggacgagacaaacccgacgatgataatacgggtgacgccggcaaacatgcttttatacatcttagagccgatcgttgccccgagaaatacttgtgatacatggttagcttgtgacggccaccatgccgtcatgtcgtgccctgtcaccgcagctccgccaacatgtacaattgctacaccgagcatgctgccgagcagccatggagctggaaattttaaaaatttcgcagctttgcaagctccccaggcagcgagaataagaatgacggtccacaaaacgggagcgagcctaaaatctgtcgttgcagaagaaatcgtctctgctgcggcacttgcggtacgatcttgttttgtatagatcagaatgactaaaaacggaatggaaagcaccacgagcagcacacgcatcatttgaacgaggctgactattgcggtattggcgcctacttcctgtgcgatgctcggcatggcggaaagcccgccgggagcggtgccgacaaagctagtcatcatatccgttttgctgaaacgccaaagcacatatcctgacagcatggccagcaggatagacaatatcagcataacgccgactgaaaaccaatggtctttgagaacagagagaacggataaattcagcttttggcccaattcaatgccgaggatcatctgcccgagggcgagccatcgtcggttaattcctttttggtctggtgccatcatcagccatgccggccgtatcatggcgaggcagcaggcgacaatcagtgttccgatcatccatccaattgatattccggttaatgaaagaataaaccccccggctgcactgattgcgataaaccatagatctttgaggagattttcgtctttcttcaatgtaaaacccttcttcctttttcacgtaacactccaattgttcacgtagtgaatgtatttattactatagtatatttttgttgataaagaaattatgaattattttctataagcgattcacttttcttatgaccttgtgttcgagcttttctattgtgtaagtcagagataaacccgctgtcagcagacacacggcaagagcgtaaaaaatcacttctccgccaaatgatgtcaggatcagcccgcctgccagcggtccgattgagcgggatatatcccaatgcagaccatagacagcataaaaccggcccagcaaatgaggcggcgccaatttcgatatgaaggtctggatgtgggttagcccgatgctttcgccaaccgtcatcaccgctgccgtcactaaaagcattgtcagggaggttgagcatgcaaaaccggcagccgcaagggagtagcaaatataagtaatgaaaaggattgttttcattgaaagcttttcggtccctttgacaagaggtacttgaagaacacagctgaataaagcttttgctgctgaatagatggtcagcatggacagataatcagaaaacatgtttttgctgaacagcctgtatgttgtttctgattgtgcatataacatgctgatggggagagaaagcagcaaaagaagcaggacaggcctgtatatcgtaaagctcgcggacattttcggggtaacagctgggtgtagcggctttgtctcaggcagtttcagtgcagcgatcagaaagtagataaacaatgccgcagcatctaatgcgaatatccacacggggttatgattgtacagcagcatccccactagcggtcctgccgtcagacccgctgaatagatcgcattgatgaccgcaaacacttccgaacgtctgctttccggcgtgctttcagcgatttgggcgcgggaagcgggaatgtacaacgatcttccgatgccattcatgacatagagaatagcgaaaacatacgcatgctcagcaaatataaaccctgtcattgccgctgattgaagaagcaatgcggtcaaaatcgctgtgcgccgcccaatccggtccgccgcctttcctgcagcgagcgtcaggaaaatatcagcaaatggctgaaggctgatgatcagcattggcatcatgatactgccgtttaattgttcatgcagatacagcaccataaaaggtcccatcattgcacctgtcaggcttgtcagcaattcgccgaaaaagcggagccgaacgggagcggtatatctcgattttatagagtgaaaactggtcaacatgtgatcgccgcctttcgctgtttgatatagtagtagtgtatagaaggggcggcggcccaaaaagtgaagaaaagaagagataaaagttccccttttgtcgggaggtgcggggattgaagctgatagagcactacgtggcgcttgtaaaaacaggctgcgccgagtatggacaaatgaacgaaatgacactcactgagattgccgactgtttattttgtacagaaagaaatgcaaagctcattttacataagctggagaacagcaattggattatccggaaaagcggggcggggcgcggccgcaaatctaaaatcgcgtttcttcggaggcctgaggaactgcttcttcaaactgcaaaggaatataccatgtcaggaaagcttaaaaaggcaaagaagctgcttcagcagtatcagtccgcgtttccggggcttcaaaacgaatataacatgtggctttcagaggtattcggatttgtgacggagacaggcgagaatggggcgaaggatgttctgcggctgttcatcacgcccgaatctgtcagcagtttggatccatgccaaatatttttgcggtctgagggccatttcgtcaaacagatatttgatacactcttcacgtttgattcggatatgcaggagccaaagcctcatttggttcatggatgggaagaggtcgaaaaaaaacaatggagattttttcttcgaaaaggtgtgtcatttcataatggacagccgctgacatcgcgggacgttgcgtttacgtttcagcgctttttggaactgggtgacaacccgtataaatggcttctgcacggagtgaaacaagtcttagaaaagggcccttattgtgtggcgctcatactcgataggccgaatgcgcttttgccgtatgctctttgtgatgaacggctgtccatactgccggcagaacagggcggcgggaaaaatggaacagggccttttcaggtgaatcagcaacacagcgggatgcttgtgcttgaagccaatgagcgctacttcaagggacgcccctatttggatcgcgttgagtttgtgttttctgagcaagccggagagatgaacggttttaccattcaagaaaaacaaacatgtcctgagcagcaaactgtttttgatgagcggcatgttcagtatttgtcgctcaatctgaaaaagaaggggcctcttcagcaccaaagctttagaaaagcgctccggctgctgatttcctctgaacggctcgttcgtgaagcgggagggcaccgaagaatcccggttacgtcctttttgcatccgagttcttttgagtgggagggcgtttcgccatctgaattgttgaagaaaagcggttacgagggcgaaacaatcgtgctttataccttttcggaaacggatcatcgtgaggacgccgaatggattcaaaatatttgcgcccagcacggtatcaggcttacacttcaattctgtgatgctgctgatctgcgacggccggaaaccgtgcagatggcggatatcattcatgacagtgcgacgttttatcaagacagcgagtttggttttctgcatttgctgctgtcggagaacagtttcttgtatcagcatctatctgaaaagctgacacagatttgctcaggaatgatagagcggatgttttccatgcctgatcgctgttcgagaatcaacatcctgcgtgacattgaccggcagatgatacaggagctgaacgcgatcccgctgtatcaaaatgtgctccaggtgacatcaagtaaaaatgtaaaaggcctggtgcttgatgaagagggatggattgatttgtactccgtatggctgtccaaataaaaagagggttcttttttgaaccctcttttttaaactgccatgctgcggcattgttcagcacaggcgaagcaggctttcgcacatgcttggcaatgatcatgatcgtgctttccgcattcagtgccgcatgcttcacaaatatcggcgcaaagtgcacaaatttctttcataaacgggctgtccgtttgcatggctttgaccgccagcgcgcaaatatccgcgcattccctgtcaagccggatgcagccgctgagatgatgctgcacgctttcttgcaagcatttagtgaaacaatgattgcaagccttcatgcaatcgatgcaagcctcaatacaagcttcagaatattgctccatggttgattccccctgtatgacagtatatggttttatgtttcccggctgcatttgaaaaaaacaggggagtgtgtttttagctaaggggatatgtacatataccctgaacgggtatatctaaccatcagatagtataggaaccagacagcgtgattttgttcatcacgtgctgcgcgcgtaaagacgcctttcgcttttaagtttgacgtttcctcggccgcacgcaagtaaaagtcgacggtttcttgttcatctttaaaagcggcatccagtcctcttgtgaaattgtccgggcattcttccgtttgtttcggcatgatgtgtttgccggtaattgaaccatacagtgtggaaaattcacggaggtggcgaatctcgtcacgcctgatttcttcaatctgttttctgacctcatcgctgtgggcgagttcggcgagcttgcggtagcattgaatggcactgaattctccgttgatggccttctgcaaatttcgaatcaaaacaggatcttccctgtatggcaccggatagggatagtagctgtaatgcaaggggattcaactccattcttaggaattgggcttctgtaaaagtatatgttgggcagggagagatgtgcggagataatcagctttttatatgtgaaaaggccgtttttaccaatagatcagattggtcattttcgtcaacattcgataaaatatatagagataaaaagagaggggtcttctaatttgggagcagagtttttagtaggcaggtccgggagtggaaaaacgaagctgatcatcgacagcattcaggatgaattgcgccgggctccattcgggaagccgatcatttttctagtcccggatcaaatgacgtttttaatggaatacgagcttgctaaaacgccagatatgggcgggatgatacgcgctcaagtgttcagtttttcacgattggcctggcgcatcctccagcatacgggaggaatgagcaggccgtttctgacgagcaccggcgtacaaatgctcctgcggaagctcatagaggagcataaacaggagttcaaagtctatcaaaaagcgagtgacaaaagcgggtttaccgcacaggttgagcggatgctgacagagtttaagcgctattgtctggaaccggaggatatccgccggatggcggaaagcggaacggcttccgagtatcgcggagaacgtgttttatctgaaaagctccatgacttatcaattctgtatcagcaaatggaaaaaagcctcgcagatcaatatcttcactctgaggattatttgacattgctggcagagcatatcccgcttgcggaagatataaaaggcgcccatatctatgtggatggcttttatcagtttaccccgcaggaattcagggtgttggagcagcttatggttcatgcggagcatatcacgttttcgctcacagcggacaagccgtcatatgagcgggagccgcatgaactggaattgttcagaatgacggggaaaacctattaccgcctgcatcagaaggcgaaggaactgaatttggacattacgtataaagagctgagcgggactgagcggcatacaaagacgccggaattggcgcatctagaggcacagtatgaagcgcgtccggccattccatacgcagaaaaacaagaagcccttactgtgatgcaggccgcaaacagacgagctgagctggaaggcattgctcgggaaattcacgccctagtcagagagaagggatatcgctataaggatgtagcaattcttgcgcgccagccggaagactacaaggatatggtgaaggaagttttcgcagattacgagattccttatttcattgacggaaaagcatctatgctgaaccatccgttaattgaatttatccggtcgagccttgatgttctgaaagggaattggcgttatgaagcggtgtttcgctgcgtgaaaaccgaactgctattcccgctcaatgaaccgaaggccaaagtgagagaacaggtcgatcagctcgaaaattactgtatcgcctatggtattaaaggcgaccgctggacaaagggcgatcggttccaatacaggcgttttgtgtcattggatgatgattttgcgcagactgatcaggaaatcgaaatggaaaacatgttgaatgacacccgcgattggattgttccgccgctttttcagcttcaaaaacgcatgaaaaaagcgaagacggttcaagagaaggcggaggcgctctatcgttatttagaagagacggatgtgccgctgaagctggatcaggaaaggcagcgtgctgaggatgacggcagaattattgaagcgcagcaacatcagcaggcgtgggacgcagtcattcagctgcttgaggagtttgttgaaatgatgggagatgatgagatttctcttgatttgtttcagcaaatgatagaagccggcgcggagtcgcttacattttctctaattccgcctgcgcttgaccaggtgtttgtcggcaatatggatttgtccagaatgtatggcacctcctgcacctttgtgctcggggcaaacgacggcgttctgccggcacgccctgatgaaaacggggtcctgtcggatgacgaccgggaatggctgaaaacgattggggttgagctatcctcaggcggacgagagcgtttgcttgatgagcacttcctcatctacatggcgttttcaagtccgtctgaccggctttacgtatcgtatccgattgctgatgcagaaggaaaaacgcttttgccgtcgatgatcgttaagcggctggaagaactgtttccgcatcataaggagcgcctgttaacaaatgaacctgaacaggtcagcgatgaggaacagctgatgtatgtcgtgaataaaagcgtggcacagtcctttaccgcgagccagctcaggttatggacacgggaatacgacatcagcgacgtctggtggagcacgtacaatgtgctgatgagtgagccggacaggctgcagtcgaaaaagctgttctcaagcctgtttttccggaatgaagtgaagcagcttgaacgcagcgtgtcgagacagctctatggtgaacgcattcagggcagtgtatcgagaatggaaacctttaacgcatgcccgttttcccattttgcgtcacacgggctgcatttgaaggaacggcaattcttcaagcttgaagcaccggatatcggccagctgtttcattccagcttaaagctgatttctgataggctgcgtgagcaaaagctggattggcgcgatttaacgaaggagcagtgcgagctgttttcctatgatgcggtagagcggctggcaccgaaactgcaaaaggaaattctgctcagctcaaaccggcattattatgtgaaggaaaaactgcaaaaaattgtgacacgtgtgtccggcattttaagcgagcatgcgaaagcgagcggattcgtaccgatcgggcttgaactgggctttggaggaaaagggccgcttccgccgctgacctttcaactgaaaaacggctgtacgatggaactcgtcgggcgaattgaccgtgttgataaggctgaaagctcaaaaggcctgctcctcaggattgtcgattataaatcaagcgacaaaggccttgacttagcggaagtatattacggattggcactgcaaatgctgacgtaccttgatttatcgattacacattcagctgactggctcgggatgagggcgacgcctgccggagtgctgtatttccatattcatgacccgatgattcaatctaatctcccgcttgggcttgacgagattgaacaggagatctttaagaaatttaaaatgaagggcttgctcctcggtgatcaggaagtggttcgcctcatggatacaacccttcaagagggacgttcaaatatcataaacgccggcttgaaaaaagacggctctctcagatcagactcagcagcagtcggtgaaaaggaatttgatcttttgacaaagcatgtgcgccgcaccttccaagaagcgggcgaacaaatcaccgacgggcgcgtatccattgagccgtacaaaatgaagaacaagacgccgtgcacatactgtgcgttcaaatcagtatgccaatttgatgaatcactggaagaaaacgagtatcgcccattaaaggctgaaaaggacaagacaatacttgagtggataaaaaaggaggcggatggcaatgaacattcctaaaccggcagacagcacatggacagatgaccaatggaatgccattgtttcaaccggccaggatattcttgtggcagcggctgcgggctctggtaaaaccgctgtgctcgttgaacgaatgattcggaaaatcaccgcggaggaaaacccaatagatgtagaccgtcttctcgttgtgacatttacaaacgcctcagcggcagagatgaagcaccgaatcgcagaagccttggaaaaagagcttgtacagcgccccggctcgctgcatattagacgccagctgtctcttttaaaccgggccagcatttcgacgctccattccttttgcctgcaagtgctgaagaaatattactacttgatcgatcttgatccgggctttcggatagctgatcagacggaaggcgagctgatcggggatgaagtgcttgacgagctgtttgaagacgaatacgcaaagggcgaaaaggcgttttttgagcttgttgaccgctatacgacagaccggcatgatctggatctgcaatttctcgttaaacaggtgtacgagtattcccgatcccatcccaacccggaggcgtggctggaaagctttgttcatttgtatgatgtatcagaaaagagcgccatcgaggagctgccgttttatcaatatgtcaaagaagatattgcaatggtgcttaacggggcgaaggaaaagctcttgcgcgcgcttgagctgacgaaagcgccgggcggcccggcgccgcgtgctgacaattttcttgatgatcttgctcagattgatgaactgattcagcatcaggacgatttcagtgaactatataagcgggtgcccgccgtctcttttaagcgtgccaaagcagtaaaaggggatgagttcgatccagcgctccttgatgaggcgacagatttgaggaacggcgcaaaaaaactgcttgaaaagctcaaaaccgactacttcacgcgaagtcctgaacagcacttgaaaagcctagccgagatgaagcctgtcattgaaacgctcgtacagcttgtcatcagctatggaaaacgattcgaagctgcgaaacaggaaaaatcaatcatcgatttttcggatttggagcattactgtttagcgattttgacagctgagaatgacaaaggtgaacgtgagccgagcgaggctgcaaggttttatcaggaacagtttcatgaggtgctcgttgacgaatatcaggataccaacctcgtgcaggaatcgattctgcagctcgtcacaagcggtccggaggagactggtaacctgtttatggtaggagatgtcaaacagtcgatttatcgattcaggcttgcggagccgcttcttttcctctctaaatacaaacggtttacagagagcggagaaggcacggggcggaaaatcgatttaaataaaaatttccgaagccgggctgatattttagacagcacaaactttttatttaaacagctgatgggcggcaaaatcggtgaggtcgattatgacgagcaggctgagctgaagcttggtgcagcgtatccggacaatgacgagacggaaacagagctgctgctgatcgacaacgcagaagatacggatgcaagcgaggaagcagaagagcttgaaacggtgcagtttgaggcaaaagccatcgctaaggaaattcgtaagctgatttcatcgccgtttaaggtgtatgacggaaaaaagaaaacacatcgcaatattcaataccgagatatcgtgattttgctccgttcgatgccgtgggctccgcaaatcatggaggagctgagagcacagggcataccggtttacgccaatttaacgtcaggctatttcgaagcggtcgaagtcgccgtcgcgctttctgtgctgaaggtgattgataatccgtatcaggatataccgcttgcctctgtgctgcgctcaccgattgtcggagcagatgaaaacgagctgtctttgatccggcttgaaaataaaaaagcgccgtactatgaggcgatgaaagactacctggctgctggtgaccggagcgatgagctttatcaaaagttaaatacgttttacggacatctgcaaaaatggcgcgcgttttcgaaaaaccactcagtatctgagctgatttgggaagtgtaccgcgacaccaaatatatggattatgtcggcggcatgccgggcggaaaacagcgccaggccaatttgcgtgttctttatgacagggcgcgtcaatatgaatcaacggcatttcgcggcttgttccgtttcctgcggtttatcgaacgcatgcaggagcggggcgatgatcttggtacggcgagagcgctcagcgagcaggaggatgttgtccgcttaatgacgatccacagcagcaaagggctcgaatttccagtcgtgtttgtagcaggtctcggccggaatttcaacatgatggatttgaacaaatcgtacctgctggataaggagctcggatttggcacgaagtatattcatccgcaattacgcatcagctatccgacacttccgctcattgcgatgaagaaaaaaatgcgcagggagctgctgtcagaggaattgcgtgtgctctatgttgcattaacgagagcgaaggaaaagctgtttctgattggctcatgtaaggatcatcagaaacagcttgcaaaatggcaggcatccgcgtcccaaactgattggcttctgccggaatttgaccgctatcaggcgagaacgtatctagatttcattgggccggctcttgccaggcacagagacttgggggatttggctggtgtgccagcacacgctgacatctcaggtcacccggctcgttttgccgttcaaatgatccattcctatgatttgcttgatgatgatctggaagaaagaatggaagaaaaaagcgagcgcctagaagcgatccgccgaggtgaaccagttcccggctcgtttgcgtttgatgaaaaagcccgcgagcagctgagctggacctacccgcatcaagaagtgacgcaaattcggacaaagcaatcagtttctgagatcaagagaaaaagagagtacgaggatgaatacagcggcagggcccctgtaaaaccggctgatggaagcattctgtacagacgtcccgcttttatgatgaaaaaaggcctgacagcggcagagaaagggactgccatgcatacggttatgcagcatatcccgctgtcacatgtgccgtcgatagaagaagctgagcagacggttcacaggctttatgaaaaagagcttctcactgaagaacaaaaagacgctattgatatagaagaaatcgtgcaatttttccatacagaaatcggcggacagctgatcggtgctaagtggaaggaccgggaaataccattcagcttagcgcttccggccaaggagatctatcctgatgcacacgaggcagatgagccgcttttagtgcagggtattattgactgtctctatgaaactgaggacggattatatctattggattataagtcggaccggattgagggcaaattccagcatggatttgaaggagcggccccgatcttgaagaaacgatatgaaacgcaaattcagctgtacacgaaggcagtggagcaaattgcaaaaacaaaggtaaagggatgtgcgctttatttctttgacggagggcacattctgacattatagcgagatccataagctccggaatttcaggcggagcgggtctcgttttctatataaaagagaggtgaaagcatttgcggattttacatacggctgactggcatcttggaaaaacgcttgaaggaagaagcaggctgagtgaacaggccgatgtgctggatgaactgaatacgattgtaaaggatgagcagatcgatgccattgtaatggcgggggatgcatttgacaccgtaaacccgccagctttagccgagcagctgttttatgaaagcctgtctgcgcttagcgacagaggaaagcgcccgatcgtcgtcattgccggaaatcacgataatcctgaccgtttgtccgccgcttcaccgctgacacatgaaaacggcattcatttaatcggttatccgacaacagagccgattcatattgaagtgccttcagcaggagagcttttggcggttggagcgctggcgtacccatctgaagcgcggttaaatgaagtgctatccgatacgtttgatgaaaagctgctccgtgatcactatgatgtgaaaatcaggcaggcgtttgagcatatgacaagccggttccggaccgatgcagtgaagattgccgccagccatatttatgtggcaggcggaaaccaaaccgattcagagcggccgattgaagtcggcggtgcatacacggtggctgctgaaagcctgccggcagatgccgcttacgttgcgctcggccatttgcatcgcccgcaaacgatcaagcgggcgcggacgcttgcgcgttattcaggatctccgctcgcctacagcttttctgaagcgggctacgctaaatcagtgacgattgtggacgcaaagcctggggaagaggccacttggcaagaggtgttattatcaagcggcaagccacttgtgaagtggaaagcggcaaatggattaagtgaggtgtacagctggctggatgaaggcagagatcagaatgcttggattgacttggaaatccgtgtcgcggaccagctgtcacttgaagagattcacaggctgcggaaggcgcacccgggctttatccatatcaggccggtttttgaagaacagaacaaagaccgggaacggatcgaggttaaacatgtctcaatcgaggaccgctttaagaaattttatgaaaaacaaactggcggtgcggtgccggatgaagaaatggtgaagctgtttttagagcttgcatcaggcgttgaagaggaggatgcgaaatgaagccgatcgccttaagcattaaggggctccacagctttagagaggagcagacgatagattttgaaggcctttccggtgccggtgttttcggcattttcggcccgacaggaagcggtaaatcctctatactcgacgcaatgacgcttgctttatacggaaaggtggaacgggcggcgaataatacgcacggaatcttaaatcacgccgaagatacgctgtctgtgtcctttacctttgcgcttcagacgaatcaccaaatctcatacaaagtcgagcgtgtgtttaagagaacggatgaaatgaaggtaaaaacggcactttgccgcttcatcgaaatcaaggacgagcatacggtgctggctgataaagccagcgaagtgaataaaagagtggaggagctcttagggctgacgatcgacgattttacgagagcggtggtgctgccccaagggaaatttgctgaatttctgtctttaaaaggggcagagcgcaggcatatgcttcagcgtttatttaatttggagcaatatggagacaggcttgtgaaaaagctgagacggcaggcgcaggaagccaatgcgagaaaaaatgaaatgcttgctgaacagtccggtctcggtgaggcgagctcagaggcagtggagcaggctgaaaaggttctcgaacaagctgaagcccggctggaagcgatgaggaagaaccgtgatcaggcgaaggagcggtttacagagcatcaggagatatggaatgtccaaaaggaaaaatccacttatgaagaagaggaaaaacgtctcgcagaagaacagccgcatatagacagcatgcaaaaacgcctgctggaagcagaaacagcagcagcccttaaaccctatgcggaccggtacgcagaagcgatccagcatgaggagcaagctgaaaaggaacaaacgctagcccaaaaggatttagcagaccggacagctttctttcagcaaaaacatgaagagtatgaagcgtggcgccagcataaaagcgagaaagagcctgagcttttaacagagcaggaacagctttcacgcttgcaggaaatcgaaatcaaactgagtgaggccaagcaagaggaagagcgcaaaaaggctgacctccggcagaaagaagcggctcttcaatctgtcatgaatgaattagaggccgtaacagaccgcctgacacgagggcaaaacagacagacagaattgaaacagcagctcaaatccctgcaggtgacatccgatgagcgaaaaagctgccagcaggccgcagaaatggcattgcgcatcagacaaaccgaggagcaaatcaaaaaagagaaaaaacgaagtgaagaattgaacctcgtgctgcagaagatgaatgaagagaagaatacactcgttcaaaagacggaagcggaagaaaacaacatcattcaggcatatgaggctgtacaaactgtgtaccatttggtgtgcgaaacggaacgctcattaacacatatgacggaagaggctagaaagagtcaacacacgcttcacttacagcgtgaaaaagcaagggtggcactgctgacaaaagagttagcccaaaagctgactgccggtaagccttgcccggtatgcggttcaaccgatcatgatccatctgcctcagtacatgaaacatatgaagccgacagccatcttgaagaggacattaaacggacagatgtattattgacggaagctgcagctctcagccaggagattctttcagccaaaattacgcttgaagaacagtccgcgcgctttattgaacagtgtccgtttttgcagacaattcaagcacagaaccttgaagcggcagcttccttcgaacatcagccggtgtatgaagcatttgaaactgccaaatttgaatggaaacgaatcaagcaggacattctttctgttaagacacgaatggcacaaatgattggcgcctatcaggagtctttaaaaaaggccgagcagcttaatgaaaaaatcggttttgaaaaaagagaagctgaccgtattgaaagcatcatcagcgagcttcaatcctcaatggacagcagtctgaatatgtttaaagaagcatttcagaatcaatctgtggacgaagcagaaaaatggcagcaagccattgaagaaaaggaccgggctgcagaagaatgtgaaaaacgaattgagaagagtatcgcgtttcttgctgagcatgaagcacaaaaggaaaaactgcgggaatctggacaccggcttgaacgggaaaagctggagcttcattatgcggctgaacgcatcaagagcgtgatagctgattatgagcacgaactcggagattatgcaaaaggagattcgattcaaatcaaactccgctctgtccagcaggatctaaagctgttaaaggaaaaagaacaatctttatatgaagaactgcaaagcgcccaaatgaagctcaaccaagcgaaaagccgcgcttcggcaagcgagctcactcttcaagaggcgaagggcagattggaaaaagcaaaagctgcttggcttgagcatacaaaaaacacctccattacccggactgaggaggttgaacaaagtctcatcccagctgatgaacttgaaaagatgaaaaccggcatagaccagtttatggataaactgaagcaaaatgctgcaaacttaaaacgagtagcagagatacttgccggcagagcattatcagagagcgaatggaacgaaaccgttgcagcattacaaaaagctgaggacgcatttggcgctgctatagaggaaaaaggcgcggcagcaaaagcactggctgtcattcgcgaccatcataaacggtttaatgaaattgaagctgaactgaaaaaatggcagacgcatatcgacaggctggacaagctgcaagctgtgtttaaaggcaataccttcgttgaatttttagctgaggagcagcttgaaagcgttgcgagggacgcctcagcaagactcagtatgctgacaagacagcgctatgccatcgaagtagattcagaaggcggcttcgtgatgcgggatgacgcgaatggaggcgtaagacgcccggtttccagtttgtctggaggagagaccttcctcacctcgctttcacttgctcttgcgctgtctgctcagattcagcttcgcggggaatacccgctgcagttctttttcttagatgaaggcttcggcacactggatcaagatctgcttgatacggttgtaacggccttggaaaaacttcagtcagacaatctggctgtcggtgtcatcagccatgtgcaggaactgcgtgcacggcttccgaaaaagctgatcgtccatccggctgaaccgagcggccgcggtacgcgggtatcacttgagttgatgtaagggaggagcggatatggcaaagcagactgccggaatatgtgagctgtgcggccggagcgatgtccagctgacagagcatcatctcacaccgaaagaggaaggcggaacgtttttgccgacagcgatgctctgtattccttgtcataaacagattcatgccttatataccaatcaagagctcgccgtacgtttaaacggaatggctgaactcagaagcgatccagagcttgcccggtttgtcaaatggatcagaaaacagccgcctgagaagctgatcaaaacaaagaaatcaaatgaacgaaaaaagaaaaaatgactaaaaagcagccctctctttgcagagcggctgcttttatccgtttccaaccatatcctgatcgttgacatcggggtctatataatttgtcgcgttgactgcattatttaatagaaggaaatctcccgtgtttcctgctcccgaaccgagcgcagattttgaagagcttttcggagaaaggtaaaaggaatcaccaaagtttacgactccgcccgatatggaattgatagctataggcccgacaattgctggcataaacgacaccctttatcgaagtctctgtttattatatgttcttggcgggcgattgtgagcgcggagactgaatctgtctgatatgtttgagtctcgcatcaccgcgaataagcgaagctgatccggcatgtaaaacagaagaggctgagaccccttgaattttgatgctgcgaacataaatagccggcacctcgtggcaaaacgcgctttgtacacctgtttcggggagcggcttcacagcctgctgctgaaagatctgatactcctttttgttaaatgagccttcattatggtaaaacgtggacagagaacgctgcacagcaaatacttttacactcatatcgatttcatttgtgtcgccaacttgaaacacacttgcgatcccgagggaattaaacttaactagtctgatgcgcgatatgcgtttaagcattattctggcgcaagcggagcaaacggcccaataataagagattcaggcggtgtatcaaaaatagaagacaggtaaatggattcagtgtctccgatgtggaaaacggaggaactggacacaccgttcatccggatgtccccgacttctaagctgcggttgatgactgtaaagatcatgcttgctcatctcctttcatttctgatggaatatgctccagaaagtgttctacagcgcggatgacatcacgcttcacatgctcagcgatatgttctgcatattgtgcaggcggtgtatgttcttcttttttgatatgggacatataataatggattcggctgtccatttgttttctgatgtcttcaataacatgatgtctgtttgtatcgtcaagtctgctgtcatattggttttcaagctgttccaaaatatctgggatttcctcggttaagtacatgtcgacattctggcggatctgctgcatgagctgagcgctctcttcctgctgcatcatcccgatttgcggtgtcgactggctgacgtcaaagttttggacgctgttcgggtcagtcggatttaaaccgatgttcaaagtcccgtcgagcctttcgattttcagctgatcaaatttatactccacacgctcaatggtagtggccggccgctgtttcatcgtattcatttcagtttgaatctctttcagctgacgttcgagctgctgaatgtgaatcgcctgctgctgaacgaaggaattcaagttttgcaggtaagaggaaacagattgatcatacatgttcttcacctctttcatatgattaacggccaggaggctggagcgggaccaatgaacctgtgtcgggctcctgcagctggagcggttgccctgagccagaaacttctggtgccggttctacatagcttcctgtattatacaaatttgacagtgacttgattgatccggcgctcccgatttgcagaatggaggagttgctgattgattccagccggagatagttgatttgaatggtttgattaatatagaagttcatgagcctcactccttttacgcattggccacgatcggctgatcaaccgcatcattgtcatacacattcgtcgcgttttgataattcatcaccttgaggctgtcgccggtattaaagctgccagcaccggcaaacgttctgacctgagcctgaggagaaatcgtaatgcagtccccgatgtgaacgactccgctcgtaccaatcgcattaattttaaacgctccgacaatggccggcatacgagcacatcctttgttgaaaaattaaaaaaagacaggtaaagtgaaatgacaattctgatttcaattgggctattcacgatagcttatgacaaacgcacatatgtgtgagagaaatttaaaggggacatatcggctctttatgaaagcgctttattttttcgggccgttatgtttaaacatggcaaaagaggatgttgggtataaattgagcggaaatgcggcgaaggatgccgctatccgcctatggtgatttttgtttatttctttggtgtttttgcgtgtagaatgctttttggagtatgtcgtgctgcggtattcgatttttgggcgggcacattctcgccctgaggtatatcccagaagtgctgagcaaaaagcggagttacatgtggtgtattctaattgttatagaaaatgatttacatacgggagttttcaagatatctcccaaaaatcatttcttctttaatccgggtattcagcaggatatccagctcttggctgcattgaatcgtttcttttgaattcatgccatatttttgtgcggtttcaattagtgtgatcctcatttcttcaattttactgttcattacgctatctccaattctagattttattttgatataaatacaggatatcgttagtataacctattttggctcaaaaggttgcctttcgtcaatttgactaaaaaagcgacaatttttgctgcggccttttttaatggagaaaggactaaagtcttgctaagtgtgcttgcaaaaagtcctgccgttcctcaatttctctaagtatgttggtctgctccttttcgatttgaaaggggctttttttgataaaaggatcatcagcagcactttgacaaatgtcaaggtgccattcgttgatgagaggagataatcgttcaatagtaaacgaccgcttcagcacgtttttcattaaggtgtgatattgcgacctgaaggcgggaatggatagaagccttgacgaaagcgtctttccttttgtcagaagcgggtcttcttcataccattcttgtacggcaagcgatcttgtctccatcggggaaacgtaaagccgaccggattcgtttaaacaaaatgtgtagtaaaagccttgattggtgcaggcgttgccgatcagccacaaaaaaaacagcttgacatccagatacaatttaatcctttcagccaattcgtcatctccggctgtgcggatcagtatgaaaaattcatgtaagaatgccgagaaatcattgttaaaaagggacaatggaacccttggatcggccgtcttcactccgtaactccttttaccggctggctgatggttcttgatgttcaaataaatgccttcaggctggccattgatggtcagaaagctgtacgaggcaacgggagcaggtacgccgatctggtcaaaaaaacaataggcgagtctgcgccgcatcagggacggatcatcctgttctgcattcaaaaaaagtgtcctttcaccaagcagagacttttcccagctgatttcataggatgccttttccgctctgtcacgctgtgtgagaagaatgggagaaacagatcgatctgttacgaaaagccccttggctgtacctttccttttcagctgctcccgatgaaaaaataaatgcacgcgctccatattctttcctccttctcaaaacgacatttgtatgatatgtagagcaagcccgtcctgaaacgaaatgaaaacggaaaggagaaaaagggatttcagcattcgacagagaatacatgaaggagcattctgatttaaaagatgatggaggaataacatgaaatttgcgacaggggaactttacaaccgaatgtttgtcggcctgatcattgacgatgagaaaattatggatttgcaaaaggctgaaaaaaaactgtttgaacttgagacgattccgggatcgctgattgaatgtatcgcagaaggggataaattcgttgcgcatgcaaggcagctggccgagtgggcaaagaaaccgaatgatgagctgggatcatttatgtattcattatctgaggtgaagctccatgcacccattccgaagccatcaaaaaatatcatctgcatcggcaaaaactaccgggatcacgcgattgaaatggggagcgaggctgatattccggagcatccgatggtatttacaaaatcgccggtaacggttacggggcatggtgatatcgtaaagagccatgaagaggttacctcccagcttgattatgagggagaacttgctgtcgtgatcggaaaaagcgggacccgcatttcaaaagaagatgcatatgaccatgttttcggatatacgattgtgaatgatatcacggcgcgtgatctgcaaaaaaggcataagcagttttttatcggaaaaagcttggatacgacatgtccgatggggcccgtgcttgtacataaatcatctattcaggagccagagcgcctcaaggttgaaacaagagtcaacggcgagctgcgtcaatccggttcggcaagcgatatgatcttttccattccggaattaattgaaaccctctcaaaggggatgacgcttgaagcgggcgacattattgccaccggtacgccatctggtgtcggcaaggggtttactcctccaaaattcttgcggtcaggtgacaaaattgatattacaattgatccgatcggaacgctgtcaaaccaaattggctgaataaaactggagggcggacccggacccgcccgttttttctgataatcatctttgtggcagaggacaagttcatggtactataagtggggtaatttatctgatagggggaacatatatgacacacctacatattacgacatgggtggtagcgctgattctgcttttcgtcagctactcgctgtattcgtcaggaagtgcaaagggcgcaaaaatcactcatatgattctgcggttattctatatccttattattttgacaggagctgagctgtttgtccgtttcgccaactggaacggagaatacgccggcaaaatgattctgggcattatcaccatcggcctgatggaaatgctgctcatccgcaagaaaaaagaaaaatcaacaggaggcctgtgggtcggcttcgtcattgtccttttgctgacagtgctgctcggtctgcatttgccaattggttttcaattgttttaatagaaaaacctatgaacccggctctttgatagagttgggtttttttatatttatcccctcatattccaaatcatttaaaataaccttaaaattccctgtaagcggtatctcgtcctatgaaattatgataccttcaaggagattcattattttgcaggagggataacatgaaacgcagaaaattcagctcggttgtggcggcagtgcttatttttgcactgattttcagccttttttctccgggaaccaaagctgcagcggccggcgcgatcgatcaggcggctgctctggaaaacggcaaagagcagacaggcgccatgaaggagccggaacaggtgaaatggtacaaagtgaccccgggagcaacggatattcagaaaaactcacatatggcactgaccgtaaagagtgattcagtactgaatgtatctgtatatccaagtaaggaaaaagcgcttaaagatgagacgtttgagatgtaccgttctttcacagcggaggatggaaaaagcgaagtcatttttccatacgcgtggagcggcccttactatgtaaaagttgaatacctcggagaagaagagccagaggacggcggaacggcagaagcagctgcagaagccaagtatacgattgggtataaaggcaccaaaaaacagccgtcagatttagaagaggaagaagcttgtccggttgaaatgagtgtcgatcagaagaaatcaggaaaaggcatcctggataagctgagagcgattcgtgatgagcagctgagccaaacagcagaaggcaaagaactgacaagcctttattacaaagcagcaccgtttatcgttgcaaagctcgcactcaataaaacagcaagaaatgaaatctatcaggatcttgtgacattaaagccgttatttgacgatgtgtcagaaaacggagcatcatcttcgcataaggtcactgaaaaggatcaaaaagcaatcaaccggctatatgataaagctttacaatcagtcccgtcattccttaaagaggagataaagaaacaagcggaccgactaaatatgaagcagctgcaaggcaaaacagccggagccattttaacagaaaaccatattgcagcaaaaagtgaagttcagacaacaaaggttattttcaaggtgaaggacaataaaagcctctcatccgtacataatgaaatgaagggcttttctgcaagcgcgcaatcgaaaaaagacatatccaatgtgaaaaaggcaaagaaactgtttgacaatctgtattcatttgaacttccgaaagatgagaaacagaacggcgcatatacggcaagcgccaaaagggtcaaaagcgctgctgcgacactatccaagatgtccaatgtagagtttgcggaacccgtgcaggaatacaaaagcctggcaaacgacattcagtacccttatcaatggccgcttaaaaacaacggtgaaaacgggggtgtcaaaaatgcggatgtgaaatatgagcctgccaacacattgctgtccaaacgcaagcttaacgatacactcattgcagtagtagacacaggcgtagacagcacgcttgctgatttaaaaggaaaagtaagaacagatctcggacacaattttgtcggacggaataacaatgcaatggatgatcaggggcatgggacgcatgtcgcaggcattattgcggcccaaagcgataacggctattcaatgactggattgaatgccaaagcaaaaatcatcccggtaaaagtgcttgattccgcaggttccggagatactgaacaaattgctctcggcatcaaatatgctgctgacaaaggagcaaaggtgattaatttaagtttaggcggaggctacagccgcgtgcttgaatttgctttgaagtacgcagctgacaaaaatgtcttgattgccgcagccagcgggaatgatggagaaaatgccttatcttatccagcatcttctaaatatgtgatgtcagtcggcgcaacgaaccgcatggatatgaccgctgatttctctaactatggaaaaggtctggacatctctgctccagggtctgatatcccgagcttagtaccgaacggaaatgtcacgtacatgagcggaacgtctatggcgacgccgtatgctgccgctgctgcaggattgctgtttgctcaaaatcctaagctgaaaagaacagaagttgaggatatgttgaaaaagacggcagatgacatttcctttgaaagtgtcgatggcggagaagaagagttgtatgacgattatggcgatccgattgaaattccgaagacacctggtgtagactggcattcaggctacgggcggctgaatgtcatgaaggctgtcagcgcagctgatttacagcttaaggtcaacaagctggaaagcactcaaacagctgtcagaggaaacgcgaaggaaggcacacttatcgaggtgatgaacggcaaaaagaaactcggcagcgccaaagccggaaaagacaatgcgttcaaggtcaatatcgcgactcaaaaacaggatcaagtactgtatgtgaaagcaacaaaaggcgatgcgaaaacatcgtataaagttgtcgtcgtcaaaggaaaaccttccggcacaccgaaagtaaacgcggtgaaaacgaaggatacggcagtaaaagggaaggcaaacagcaaagcgatgatcagagtgaaaaacaaatcaaagaaagtcattgcttctgccaaagctgacgcaaaaggaacgttttcggtgaaaatcaaaaaacaaaaagccggaacggtgctgtacgtcacggctgcggatacagataaaaaagaaagcaaggaagcaaaagtggttgttgaaaagtaaccaaaaagcggtgctcgatgcaccgcttttttatttgcgcccccgttggactgctgaatacataatggatcgctttccgtttgaagccgtccattcaaaacggtctcctgtcccttcgctgctgtagtgatgctgcatcgcgcattgtgcggtgtcatttgaaaagtgataaaaggacacaccctgccccgccgaagtatccgaaaagactcctttattataagaaaagacgcaatcgaataccgataagccgaagctgtgcaagtgctgcagaaatgcgagaaaggtttcgtcgtcaagcgaatccaaaagcgccatgagaggccgcttgactgatttctcatagcggatgcgttctccgccggaaagggagatgttttctgcaccgcatgccaaaaccaacttgtcctgaaagccggcttgctcccactttcctttatgatggacccagattgggctgtgttggagactgtccgccagcagtatatcgccttcaccgttttcgattaagcagatgccgtcttcaatgaggatggtgccgtattcccactttcgttcctctgtatataacaattgtttccgtttcatccatgctgtctcctttttcttcattcctctcttttctttccaattcaagcctgtcccatacaactcttttatggacaaatcaactatctgcctatagatgcataaacttactaaggtgctgaaagaaacgaaattgttacgaaagaaacgggattggagctgatgtcacatgtgtggaattacgggttgggtcgattttaaaaagcagctcgtccaggaaaaacaaacgatggacagaatgacagacactctttccaaacgagggcctgatgattcaaacgtttggggggagcaccatgttttattcggacataaaagacttgcggttgttgatattgaaggcggacgccagccgatggcgtgtacctataaaggggatacgtacaccattatttacaatggcgagctttataacacggaagatttgcgcaaagaattgcgggcgcggggccatcaattcgagcgtacgtcagataccgaggtgcttctgcacagctacatcgagtggcaggaagactgtgtcgaccatctcaatggcatattcgctttcgctgtgtgggatgaaaagcgtaatctgctgtttgccgcgagagaccgtctcggcgtaaagccgtttttttacacgaaggaaggctcttcatttctcttcggttcggaaatcaaagcaatcctcgcgcaccctgatataaaagcgagagtggacagaacgggactttctgaaattttcggtcttggaccgtccagaaccccgggcactggcatatttaaaggcataaaagaaatccgcccggctcacgcgctgacattttccaaagacggacttaatatttggcgttattggaatgttgaaagcgaaaaacatacggacagttttgatgacacggttgccaatgtcagatcgttatttcaggacgcggtgacgcggcagcttgtgtcggatgtgccggtttgcacattcctatcaggcggtctggactcaagcgcaattacagcgattgcggcgggccattttgaaaaggaaggaaaagcaccgcttcatacttattcgattgattacgaagagaacgataaattttttcaagcaagcgcttttcagccgaatgatgacggaccatggattgaaaaaatgacagaggctttcggcacaacgcaccacaaatgcgtcatcagccaaaaagatctcgttgatcatttggaggaagctgtactggtcaaagacttgccgggaatggcggatgtcgactcatccctgctgtggttttgccgggaaatcaaaaaggactttgtcgtcagcctatcgggagagtgcgcggatgagattttcggcgggtacccgtggttccatacggcagatgttgagtctggctttccatggatgagatcaacggaggagcggatcaagctgctttctgactcatggcagaaaaaattgaatctgaaagaatacgtaaatgccaaatatgaagaaaccttggcagaaacgccattattagacggagaaacgggtgtggataaagcaagaagacagctgttctatttaaatatgctttggtttatgacgaaccttttggatcggaaggatcgcatgagcatgggggcgagcctggaagtgcgggtgccgttcgccgatcaccggcttgtggaatatgtttggaatattccgtgggaaatgaaaatgcatgataatcgggaaaaaggcattttacgcaaagcgcttgaaggtattttgcctgatgacattctgtatcgcaaaaaaagcccgtatccgaaaacacatcatccggaatatacaaaaggcgtcagcgaatggctgaaaacgatcagaagccaaaaggactccgtgctccataccttgctggacagaaaacaattagatcagcttttagaaacggaaggctcctctttcaaggtgccgtggttcgggcagctcatgaaggggcctcagctgatcgcccatcttgctcaaattcatacatggtttgaagcgtatcgcattgatattgacgagaggtaggttcaatgcaaatgtgattaaaagccagagatgtatagatttaaataagaaggatagatgagcagggaaatatatgctctatctatccttttttgtacaacagcactatcgaattgcccccgcattccttcaataagaatgaataggttttaatgttctgccgataaaactagctgataccgggcttaactttaattccctagcccatacagaaagttgaccaatatggtgaatttcgtgagcgatgatatggtgtaatatttcatctcgcgtatataaaacacttgtctcccaaggaacgcttacaagttcatcttttatttgatctgaatgtgtttgtaaaacatcaattatttcagttcggaatgtatttgagagagatttcactttattgagtgtttgataatcagcgaactgaacagcgatatcttcttttccttggatagcacgaatccaactatattccacatcaataatatgaaaaagggtatataaaatattctctactccgccaagacggtttttaagtaattcttcagtggttagttgatgacaccaagtaaaccattgatctctaacctgccagttatattcaaaaaattttatcactgaactcactccaatactatcatgtatcataacaattagcccttttttccgtgattcctctattattgaagtgatgattgagaaatgtttacattctacctgttgtatggcattaaaaataataatgcatatctcgtcgatgatgctgtgcgtcttgttacttttacaaagtaagaatcggcattttcttcatatacaattaggaaaaaacatactagacttgaagaagcagtgatacataggagtgagaaaatgaaagagataaaagaagcttaccagcaatgcggacagattgttggcgaatacgcgccagcctgtttcaaagcattatcatatctcccgctaaagcaaagacaagcctcttgggcagtattgtcgttttgccacacggcggccagtgcagacgaaaaggtattgcccgcatttgaagctaaagctgatcatgtttaccaaaggacaaataacggtaaacaacatctatggaaggcttttgatcatgcgtatcggacctttacattggaaagcgaaccttttcgggagtttattgccgcacaaaaagaagacgccaagccgtatgatgaccttgatgaactgctcatgtacgcatatcggacgggcggtgctgccggattgatgctgctgccgatactgacacgccgaaaacaagatcagctcaaacaagcagccgtctctctcggcttggccatacagctggttcgcttcttaagtgatcttggcacagatcagcaaaaaaaccgcattccccgtcaggtaatgcagcaattcggctatacagaggctgatctccaaaaaggcaccgtaaataaagcgttcacaatgacgtgggagtatatcgcttttgaagcagaagcctaccttgaagagtgtcaggatgccttgccgctatttccgcagtattctcaaaaaacggtgaaagccgctcttcatttgcaccgggctgttttagaaaaaatccgggcgaagcagcacgatgtatttcaatatcacttcgctctcacagagaccgaagtgaagcagattctgtctgatatctaaaaaacacccggccttgattgagccgggtgttacgccatacctttttgaatccagatacgtgagcgccatcttctgtacattaagattccccggacccattcatccgcgataaaagaaatccaaatgccggcaagaccgaaaccgaggtggatgccgaaaagataagcaagcgggaggccgatgccccacattgaaatcattgccatgtaaaccgggaatttcgcatcccccgcagcccgcagagagttaatgataatgacattaaacgagcggcctggttcaagaataatggtcatggcaatcaataggcttgcagttgctataatgtcagggctttgtgtgaagagtccgatcaggtcttttgaaaagatcgtcatcaaaacagaggtagccgcagcaattccgagtgcccaatataagctcttcatgcagcgctcataagcggcatcaaattgtttgccgccgatataacggccgattaagatttgtgtaccctggctgatcgcagtgccgaacagcaaaataaacatcgtaatattttgcgtatacacttttgttgtcaacgcctgcgcgcccatgatggcgataaaatacgtgacaatcatttgcgaaaggttgtatgaaagctgctctcccgcagaaggaatgccgattttcagcagcttgcgcaaatgctctttatgcatatgaaagacttttttcagcgacatcttcagctggatgcgtttgttgacaatcacaatcatcgcgattaatccgatgacgcgggcgatagatgtggacatggccacaccggtaacgccgagaacaggaaagccgaacaaaccgaaaatcacaacaaagtttccggcaatgtttaaaatgttcatgccgatagtgacaaacattgtatcttttgtgtagccgtagctttttaagatcgcgctgaatgtcatgattaaagcctgaataaaggacagacctccgacaacttgtaaaaagactttcgcatcaggcatcagtgcgtctgataatcccatcatatgaagcagagggacagccgcgaaaaagacgacggcgctgatggccaggctgatgaagaagttggcgccgattgacacataagcgacttccatggcttctttcttttgccgtgagcctagaaattgtgaaatgataacggtcgttcctgttgcgataaagctgaacatcacgataattaaatttaaaatctggttgctgacgccgactgctgccacgctgttatccgagtattggctgagcatcagtgtatcggcattacccataaacatatataatgagacctcaataaagatcggccaagtaagcgaaaataatgagaacgttttgtcagcgggttttttcaaagcagttgatttgaagacagcttgtttcatagtgtctaacccctttcgtaaataaaatcaacgttttaaagtgtacctccatttccttataataaaaagggatagaaacgatacttcttgtaaaaatccgacttaaaaaggaggatgattcaaatgccccgcatcctgtttacagtcccgccttttccggtatttattgcagctggggaaggggtttttaaaaaaggagaaacccatgtgaaacgtgtattctccgtgtttgatctgatatatgtcaaacagggaacgttatatataacggaaaatgaaacatcgttttctgttgaaggcggcgagtacatcttgctttctcccggtcttgaacactacgggacgaagggcagtgatgaagcaacctcctactattggcttcacttcgatgaacatcgatatgaatttacggcaaagggaggcagcaactggtctgagcttcagcaggaaaaagggagcttcgaagagccggcccgctacggattggctttgccgagaaaaggcaaggtgcagcgcccgcagtttatggcgcagcagtttgaaaagctgatcgattactccgcggaaaactctgatttgcccctcagaaagcaaatcttatttgaggagctgatgctgcatcttcaaaaagaagcgttccaaataccgtctgcgaaagagcgggtagcctgggaggcggcccggtacttacaggagcactataaggaaaagacgacaatcaaggatctgtcgctcgcccttcactatcatcaggattatgtgagccgctgcatgcagcaggtgctcggcgtaactccggcacaatacacgaaccgggtgagaatgacggaagcgaagcgtcttttatcctctacaaatgataaaatgggcgttattgcggaaacggtcggaatggaagatccgacatacttttcaaaactctttaagcagatagaaggcatttcaccaattgaataccggaaaattgtcagccggaaagttcaataaccagacgagggatgaacatgaaaacaacaatttacgatgtggcaaaggcggcgggtgtctcgatcacaactgtgtcccgtgtgataaacaatacggggagaatcagcgataaaacacggcagaaggtcatgaatgtcatgaatgaaatggcatacacgcccaatgttcacgccgcggcgttaacgggaaaacgaacgaatatgattgctctcgtggcgcctgatatttcaaatccgttttacggcgaactggccaaaagcattgaggaaagagcggatgagctcggttttcaaatgttgatttgcagcaccgattacgatccgaaaaaagaaacaaagtatttttctgtgctgaaacagaaaaaggtggatggcattatttttgcaacagggattgaaagccatgacagtatgtctgctttggaggaaatcgccagtgaacaaattccgattgccatgatttctcaggataagccgcttcttccgatggatattgttgtgatagatgacgttcgtggcggatatgaggctgccaagcatcttctgtcactcggccacacgaacatcgcctgcattattggagacgggtcaacgacaggcgaaaaaaatagaatcaaaggcttccgtcaggcgatggaggaagcgggcgtgcccattgatgaatcacttatcatccagacgcggttttccttggaaagcggcaaggaagaagcgggaaaattgctcgacagaaacgctccgactgctatttttgccttcaacgacgtattggcttgtgccgccatacaagctgcgagaataagaggcataaaagtgccggatgatctttctatcattggttttgataatacgatactcgcagaaatggcggctccgcccctgacaaccgtagcccagccgataaaagagatggggcggagcgtcatcgaactgctggcagaagcaatagagggaaaacgaaaggcgaaacaaaaaatagtgctcccgcctgagcttgtagtcagacattctacatcaccgctcaacacatgagcccgctaatgagcgggttttttcattatgacagttgaagccaaaaaaacatattgcgtgtaaaccaaaggcagtgtaaaatgaaaccatcttttgagaaagcgcttgcgcaaaatggcagagcggatagaaccgctgtttttttagctgttaagagaaagcgctttcccaaagcgagcccgaaatgagataaaggagaggatgggacgtggaacatcaagtaaggtgcgcagtattgggattaggaaggctcggttattatcatgcgaaaaatctcgtcaccagtgtgccgggggcaaagctggtttgtgtcggtgatccgttaaaagggagagcggagcaggttgccagagaactcggtatcgaaaaatggtcagaggacccgtatgaagtgttagaagataccggcattgacgctgtcattatcgtaacgccgacaagcacacatggtgatatgatcatcaaagctgccgagaacggcaaacagatctttgttgaaaaaccgctgacattaagccttgaggaatctagagcagtttctgaaaaagtgcaggagacaggtgtcatctgccaagtcggctttatgagacggttcgatccagcatacgcagatgccaaacggcggatcgacgctggagaaatcggcaaacctatctattataaaggctttacgcgcgaccaaggcgcgcctcccgcagaatttatcaaacacagcggtgggatttttatcgactgttccatccatgactatgatattgcccgttatttgctaggggcggaaattacttctgtttcaggacacggcaggattctgaacaatccgtttatggagcagtacggcgatgtggatcaggcgctgacgtatattgaatttgactccggcgcagcgggggacgtcgaggcaagcagaacctctccatatggacatgacattcgggcggaggtgatcgggacagagggcagtattttcatagggacattgagacatcaacatgtgaccatcctatcggctaaagggagcagttttgatatcattccagactttcaaactcgttttcatgaagcctactgcttggagcttcagcatttcgccgagtgtgtccggaatggaaaaacaccgattgtgacagatattgatgcgacgatcaatttagaagtgggtatcgccgcaaccaattcctttcgaatcggcaggccggtacagctagatgtgaagcacgcttatacaggtatgtaaaagctaaatatgttgcattttaggctttccgcaaaaaaaagcaaggacatttttagcccttgctttctcttttctcatataaatagtacatataatcagtaggtatgcctgaatggcccagctgtctcagcatggcggttacgttacctctatggtaagtcccgtgattgacgacatgcaggatggtgtctgcataggttgattccagtgtacctagtttcggatgctgcattgtgaaggtctgttctaagtccgtctggcggctgaagaaatcatgatactgtgactccagctcggcagcgtgctgtttaatcgctgccatattaccttgcgcggactctaatttgcctgcgctgtctataatctcttggtaggccactcccgaaagaacattcagccaaatgtagtcagccctgcacatatgaagcagcacgtcgctgacagaaggaaatacgctctttacttcttgataggcagtttcctccggcaggttttcgatatgggtaaatattttcttgtttgcccaagaatgatagtcataaaactgttttgcatcagtcatcagcatgcccccttttctaagaaattcgtttttttcatctgtttctccttcaattgcaaaagagtgacaccccaaaatatcctgccgctgcccacataaccgctgcagagcatttgtttacgatcagcataagcctgccgctcgtatctatcgtctgaaacaaccggcccgctattgcaaggctgataaaccaaatccaagacacagcgatgcaggcggccataaagagccatttctcaagccccgaatattgaagagagctcgtgccgatgacgccgatcgtgtccagaatggcatgcgggtttaaaagagaaacagcggccgcaaacgcagcttgcttttttggtgtgaacgtatgtttctcattttggcttgtgttcggacggctgttccaagtcacccagcccatataaagcaaaaataaaaatccgccggccatcatgactgtctcaaacacaggcagctcctgcacaatgacagacacgcccgcaacggctaatacgattaacagggtatcgcagactgaagcactgatgacagctgggagagcccgccaaatatgcttttgccacgcgccttgctgaaaaataaacacattctgcactcccagcggcaaaattaagccaaacgcgagcacaattccgtgaatgattgcattcatgctgaaaaagctcccttcacatttttttcaatcataagagagattgtcactaaagtctccagccatttggttgggttagaaaccagccaaatgtataatgtgtaaaaaaggggggcatgaccttgtcgcaatggcagccaagccgaaagtcggatgttccgctgcatcggcagatcgaacaatatatgaaagacaagattcttcacggagagtgggctgtagggacgaaaatcccctcacagagaacgctggccggcatgtttcaagtcaaccgcagcacagtcacagcagccatagatgaactcacgtctcaaggcttgttagagggaagaagaggcggcggtacgaaggttgtaaacagtacttggagcgtgctggcggctgagcctccgcttgattggagcgattacgtccgttcgggcattcatcgcgccaattcttccatcattcaagctattaatcagaacgaaccaagagcggatatcatcagattaggaactggagaactttcaccggatcttgtgcctgctgacacaattggacggatgtttcagcaaatcaatccgggcgccctgtctttaggatatgagcagccgaaaggaaaccgtcagctgcgggaggcagtagccgaccatttaaaaggaaagaagatccatgtgtcaccgtctgcaattttaattgtgtccggtgcacttcaggcacttcagctcatctcaattggacttttaaaacgagattctgtcattttgacggagaagccgtcctaccttcaatccttgcatgtatttcaatcagctgggatgcggcttcgcggcttgccgatggatgatgaaggggtcaaagcggggcttgtttcttctaatcgaaaacaatatggaggacagctgctttacacgattccgtcgtttcataatccgacaggcacagtcatgtcagagcagcgaaggaaagagatcatcagcctgtcaaaaaaagagcagctgcccatcattgaggatgatgcgtacggtgatttatggtttgaagaaaaaccgccgcagccgttgaaagcaatggatcatgagggcaatattctgtatctgggcacgttttcaaaaacggttagccccggtctgcgaatcggctggcttgccggtccggagccggttattgaaaggctggcggacattaaaatgcagacagactacggatcaagcggcctgtcccagtgggcggctgccgagtggctgtcacaggggtattatgaagagcatctgacttgggtacgcaggaagcttaaagaaaggagagacgcagccgttcattttctcgagcggtatgccggggacattgccacgtggcggattcccgcaggcggcttttatatttgggtgacatttcacaaaaacctgcctgtcagccgtttcttttatggattgctgaaacggcaggtgcttgtgaatcccggctacatttatgacggtgaagaccgaaacagcatcaggctgtcatattcctatgcatctcttggagatttggaaactggcattaaagcggcagctgaaacagcacgctgcctgatgatgtcctaagctttggttatacgatgacagctcccagtgccctggcgaaggcaatcgcgtgctcaggtgcgattttgcagcctttcaatttgtcgagggagacatgaagctgttcaaaacggcacgtgctgatgtccatgttttgaagggatgtgccggtaaagctggcgccttccaattcgcatccgtcaaagtgtgtctgctggagcaccgtattgctgcattcactttgcataagagcacagtgatcaaatcgaacttgtttcatatttgagtacgaaaatgagctgaaatgtccgtggcattcctcgaatgaaacatttcgcagcgttgcttccgccacattcattccaaccatttttgactgcttaacagaagttctgtgaatgacagccccgctgaaatcggcgtttgataaatcacatttttcaaagatcacatcggtcagttcaatatgccgaaaagacacatcgataaagacgacatttctgaataccgttttttcaacacagagtctttcgatatcttcgccgcagattgtacaatcttcaaacaaatgcatgctgattacatcatcctgcgtcacggcatcatgaaaatctgcggtttgcaggttttccggtatgttcggtttttgaattgcgattttattcatgtgatgacatcctttgctgcccgaaaaacagaggcttccgggttcaatttaatagatcgttaaggaaattgatacatatagtaaatcgtgaagagccttttcttggtacagcagccagcttgttttgtaagcataaatggaaagcttcctatacgtcaaggcgtttacaggccgggaaagccaaagggaacaggaggaatgcggaatggggcattacatcaaaaccgaggagcatgtgacactgtttgtagaggatatcggacatggaaggccgatcatctttttgcacgggtggccgttgaatcataagatgtttgaatatcaaatgaatgagcttccgaaaaggggatttcgttttatcggcgttgatttacggggatatgggcaatctgaccgcccttgggaaggctacgattatgacacgatggccgatgatgtgaaagcagtcatttatacgctgcagcttgagaatgcgattcttgccggtttttcaatgggcggcgccattgcaatccgttatatggcaaggcatgaaggagccgatgttgataagctgattttactgtctgcggcggcccccgcgtttacaaaacgcccgggttatccgtacgggatgaggaagcaggatattgacgatatgattgaattgttcaaagctgatcggcccaaaacactggctgatttagggaaacagttttttgagaaaaaagtgtctccagagcttagacagtggtttctcaatctgatgctggaggcctcctcctacgggacgatccactcgggcatcgcattaagagacgaagatctcagaaaggaacttgctgcaatcaaggtgccgacgctgatcctgcacgggagaaaggatagaattgcgccgtttgattttgcgaaagaattgaagcgcggcatcaaacagtcggaattggttccgtttgcaaacagcgggcacggagcattttatgaggaaaaagagaagatcaacagtttgattgcgcagttctccaactcataagaaaaaacccgacattgatcgggttttttatataattcctctgttttgcagtgcgttaatgatgagatcagctccatcggaaatagaggtctggtctgactcaatgatgaaatcgggtgaaagcggcgcttcatacggagaatcgatcccggtgaaatgtttgatctctccgtttcgcgcttttttataaagcccttttggatcgcgctgttcacaaacatgcagcgggcacttcacataaatttcgaagaactcacctttaggaaagagcgctctaaccatgtcccgatcctctctgaatggagaaataaaagccgttaaaatcatttgcccgctgtcgacaaacagcttcgccacttctccgatccggcggatgttttcaatcctgtcaccagtctgaaatccaagatctttgtttaagccgtggcggatattatcaccgtcaagcacgtagctctgaatgcccttgcggtaaagcttttcatcgacagcattggccagcaccgattttccggagccggacaaacctgtaaaccaaaggacgcagcttttgtgtccgtttaaggactgtctgtcagactttgagatggcagcgggatgccaaatgatgttcggattgtgtgtcattgcaattccccgctgttttgcttgatggcaacaggctgttggtgaagtcccttgatcagcacggctgcgacctcaggccggctgaattctttaggcggctttttgccttggcggagaagctctctcacttttgtgcctgataagtggatgtggtctctcgggctgtgcggacatgttttggaggtgcccatgtttccgcattttcggcaataaaagctgtgctcaaaaaacagcggcttgatgcccagctcttcctctgtgaatgattgaaaaatattttgggcgtcgtatgttccatagtagctgccgacacccgcgtgatcacggcctacaataaaatgggtgcagccgtaattttttcggacgagcgcatggaaaatcgcttcccgcggacctgcataacgcatggcggcagggaaaaccgataacatgacacgatcctttggataatagtgattaagcaaagcctggtagctctccattctgatatcgctggggatatcgtctgactttgtttctccgacaagcgggtgaagcagcagaccgtcgaccgtttctaacgctgttttttgaatgtattcatgcgctctgtgaacagggttcctggtttgaaagccgacaatcgtcttccagccgagttttttaaaggcggctcttgtttcagcgggcgttgcataaaactgttcgaaagatttgtcaggcaggcggctgaccgtgataggccctccgatatagtaatccgggcgcgccagcaatttttttacgcctgggtgggcaggatcgtttgttttaaaaacagacagtgcttcttgtgttttatcaggctggtatatatcggtgactgtgatcatgccgtaggtaacaccgtctttcacaagcttgacgtgatctccggcagacagctgttttgctgttttttctccgacaggcagcgtaatcggcaggctccacggcaagccgtttgccagcctcatttctttcacaacacgatgataatctttttccccaaaaaaacctgttaacgggctgtatccgccgatcgcgataagctccagatcactcagtgcaagctgatccagctctgcttggcacgcgcacccttcaaaatggcatgcgggatcacagcggttgattaatacccctccatggggttcgtttccattcaacgtgttcaacctccatttatacgtttccttgttttcttttctgcagttaatgaaagtttgacatcagcgtctcaacatcatttcgattctcacatcaagaacctgccatccgctattcctgatgcaggccgcattctgttttctcccgtccggcccatcttccagccctctcatcgttcgggtccggggaaggcagtgtacacatttcacagcctatgctcggataatgttgatcgtgcagtttgttataaggcaaattgtgcaggcggatgtacgtccaaacgtcatcccatgtccagtggataagcgggcaaattttgatgagctcaaacttctggtccaggtttacgtattgaatatgctttctcgttggtgactgatcccggcgcagtcctgaaatccaagctgtcatgccggacaggtgctttttgagcggttcgattttccgcaattggcagcagaggttcgggttatgcttccacagctctccgccgtacttcgtcccctgttctgttaagctcagctcgggttcgagcatctggattgcaaatcccggatatcgctctttgacggtctcgatcagctcatatgtttcctgaaaatgaagcccggtatccaaaaagatgatgtgtgcatttttgttgatttttgatattaagtcgagaagcaccattccttctgcgccaaagctgcaggcatacacaatcttttctccgtacgttcggtaagcccatttcaacacatcgagctcatcgatcaattgatccgttatccgtttggacagcatgtcgttccatgtgtcatatgtgatggtttcgttcaatgttttccccccgtttgcatctgctttttttatctattgatcgagttataggcagactattcattttttgcataaaggttcaggttttaggtgccgcgcccgcctaaaatgaggtgcggaaccattaagagcccggctgaatatgctttttagcaaaatggttttatgcccaaggagaggtagtatgccgattgccatttatcaggggcatcatcattcgcttgccccggcggacattaacatcgtcattgatgtcatcagagcctttacggtcgcccattatgcgtttatcggcggggcgaaagagattttgttggtccggacagctgatgaagcctttgcgctgaaagacacctatccggattatgttttgacgggagaggaaaagggggtcggtatcagcggatttgatttagataattctccaaaacgtatggctgggcagaatatgacggataaaagcctgatccagaaaacaacaaacggcgtcacagcagcattgggggcgctgaacgcaaagcatctgttcgtaactggattttccaatgccaaaacaacggcacagcatgtgaaaaagctcgtcgcaaacgattgtgtcataaacatagtggcttcccatccatccggtgatgacgatatggcatgtgcggagtatatcaaaggcatcattgaagggacaaatgtggtaacggctgcggaggcgattgaaagaataaaaggctcttctgttgcggagaagttttttgactgccgccagccattgtttgattcggaagacatcgtttactgtacaaaagaactgacgggcgatttcgtgatgaaagtgaaacaagatggagaagttccaacgatagagagggtcataatatgaatgatttttcactagaattgccagtgagaacaaacaagccgagagaaaccgggcagtccattttaattgataacggctatcccttgcaatttttcaaagatgcgatagccggagcgtccgactatattgattttgtgaaattcggctggggcacctcattacttacgaaagatcttgaagaaaaaatcagcacactgaaagaacatgacattacatttttctttggcggcacactgtttgaaaagtacgtaagccagaaaaaagtgaatgaatttcatcggtactgcacctatttcggctgtgaatatattgagatttcaaacggtacgctcccgatgacaaataaagagaaagcggcttacattgccgatttttctgatgaatttcttgtgctcagtgaggtgggcagcaaggatgcggaattagcaagccggcaaagctctgaggaatggcttgaatatatcgttgaggatatggaagcgggcgcggaaaaagtgattacagaagccagagaaagcggaacgggagggatctgttccagcagcggcgatgtcaggtttcaaattgttgacgacatcatttcctcggatattgatatcaacaggctgatttttgaagcgcctaacaaaacgcttcagcaagggtttattcaaaaaatcgggccgaatgtgaatctggccaatattccatttcatgatgccatcgcgttggaaacgctgcgtttagggctaagatccgataccttttttctgtaaaatagcggctgcggggctctcgtcgtgaagagagcctctgcctattattttttatggcggtacataggcgtgagatagggaagtgaggtcaggcggatgttgtagatgaagtcgatgactcttgtcgatatcacctggcatatgagggcttgaatgacgatgccccagtcaataatagacgcggtgaccataaaaatgatgcaattcatgatgagcaggatcgttccaggattcccgccgcggtagatagaaatcatcagagcaagggctccgaatcctccgttcgaaattttatatttgtataaaagtccgattccgagtcccaataacactgcgccgcttgccagatcaagccacaggttagatgtgatatcaggaaaaactgcatcaaagatcaataccgagacagaggtgacggtgatagaagcgagggtgccggtgaatgttctcatctccagccattttaaagcggtaaaaagcattgatacattcacagcccacactgaaaatccgtgggggatttgaaacagataatgcaatagcaccgcaatacctgctgcaccgcctgtcggaatatcatgcggaaataaaaacaaggacatgccgagtccctgtagtacgccgcctacgacaatcataaacgtaagttttgctttcatcagcagttcagccattaagtcatttgctcctttatgaaaagacttgtccgctgttttcattttatgaggctgtccattatttatgtctcaaaataaagaaatggcccagcttaataggctgagccatcccacttgtagcgattgacgatctccatattgatctctgtgccaatgccttttcctttcgggatgtggaccattccttttgaaggctgcaggctgacgagatctgtaaaaggattctccatgacgtcccactcgatcggttcaatgtgatcgtacttcattttagaccatgggggcagacaggcttgtgcaaataaagcatagagccgtgaaagcgatccgtcatatgcatgggcggatgctctgacgccgaaataacgcgtgagctggaggcagtcccgaaactcatcaattccgttgacatgcatgacatcgggctgaatgatatccaaacagcgctgtgaaaggagaggcacatattgcgccgggcctttcatgttttctccgccggcaacaggaacagacaaacggcttcgaagcatagcgtaatcctgcggctgatcaaagggcaaaggctcctcaagccagccaatgttcgtccattcggagaaatagcgctcccatttaaaagccgcagcggtatcgtagctttggtttgcgtccagaatcatcgtaatggagctgcctgctgtatgctgcagcgcattgatgtgccggacatcctctttgaatgaagtcccgccaattttgactttgatttgctcaaaaccttttttcaactgggcttcaacattggagactgagcggctgatccattgcggggagtctgagtacgattgaaaagacgcgtacacaggaatctcctctctgtatcgcccgccccataattcgcaaaccgaacaatccgcagctttggctgcaatctctgtcagcgccatgcttacagcggaggccgcccgctggtgccatttttgaatcgtgcgcactaatgacaggcggctgccagcctgttttcctaaaagaaacgggatgatccgtttcgtaaaaccgacatggagagcagggagccaatcaacacattctccccagccgtctatcccgctttcggtgataatcctgatcagataacaagtccgatatcgtttaagcccgttggcgtctccgtatggcttgtttaatcggtgcaagagcggaaaggtttcaatgcgtacaatcttcaaaccgtgtgctacctttcctcagcgggctgcagccgattgccagccattttagggtcttctttctcttttgtttcttcattattttgcttcacatggattaacatcatcacaagaatgccgacaacgagagtcaatcccgcaatgcttaaaaacatgccgggtctggaccattgcatcaggcggccgaaaatcggagggccgattgctacccctaagaagcgtacagatccgtacagcgaggtgacaaatccccgtctttccttgccgacagccccggtaatgaaactgttcacacaaggaaggacaagacctgagccgatactgctcagcacgagaacactgataaagaggacaagattttcaatgaatgacagtgccgcgtaagatacggtcatgaacgccaatccgagtacgatcagttttttcattaacgattgcttttgcccgattttgcttcctgttgtataagacgtaacacacataaccaaaagcggaatcgctaaaatcaagccttttttcacgccgtcggtgtcgtatgttttttcaagaacatctgataggtaaaacaggatgccgaataaagtaaacaaacaggtcgcaccggctaaataagcggtaaacagccatctgccttcatgtttaaaaacacttaacagccctttcgcatattttccgataggtggcggttctttttcctttttcttctctttaataaaaatccaagtcagcacgattgaaatgatacaaaacacagggaaggcaaaaaacgcgccataccagacaagcagggcgataagcgagccgatgatcggtgaaagcactttccccatgccgtttgaagcttcaacaaggcccagcaccttgctctcctgggcgcctttaaacagatctcccgtcagtgccatggcaatggggcctgttccggctgccccgattccctgaagcgctcgtcctgccatgacccaaggaaaggcattgtcaaaaaaacctgccgcaaacccggctaacaaaccgccggcaccatacaaaattaagcagggaataatgatgattttccttgagaatcggtctgcgagataaccgacaatcggaatcgcaaatgctgcaatcaaggaaaatactgtgatcacgagactgacttgaaattgtgataaatgaagttcagatttcatttttggcaaaatcggaataagcatcgagtttcctagggttaatattaaagggattgaaccgattgctacaatcgtcattccgttattttgttttgatgattccatctcagagcacactccttttcttctgcttagaatgtccctgatggcttcgtttattcagcgatcagacagcaaaaaaccgaacagaagatacctgttcgggaaaaaagagggttaaccgagagcctgtgaaatcaaagcatataagtgtccattttgaataggcgcttttttctgatagaacaaaatcggaggttcatcatctttatgaaatcccatttctatcaggctgtcatgcagagacgtgtgttcactcggtatatcgattcgcatcggcccttgtttgccggccgccagccttgtaattatctgtgctgcaacatctgatgatggagcgatgatagggccgaatttcaaattggccggtgtctgtacagaaagtccgtagccaatgagctgtccgtcctgatttctggcgatgatacattcgcatgaagcagaaataagctgctgcaaaaggtttgatcgatctccgccaaaggcagccagatccgccgcggttaagtcgtgaaagtcttgttctctaaaggatgtcagttcagcatcaagcttttttgtataaggttgaaaactgtgacagctgtactttcgcactgaacctgccgtatgaaaacctgctttttcataaagcggcaaaccttcttttgtggcgcaaagcctgatggcggtgttttcatccgtttgggtaatacaggcgtttaccatacgccggccaagaccgagccgttgatattctttgtcaacgatcacgaggccgatagaagcaagccggccaaacaaaaacaagccgatgcaggaaataatatcaccgctgacattttgatagccgaaaaagcgtccttgctggacaagcagtgccagctcttgttcgccgtaatccggccacccggcttgcctgcaaagccgcaatagactagggatatgttcttcatgaagcttaatcagctcatcgattaccctcatacagatcacctgcttgtttcgagttttttatacatgatgatatgtgtgcctatgccgggaatctcaaacggttcgccgagttcttcccagccaagctttgaatagtagcctttcacatggcttctggcattgcaccagactgcctgaacgccgttctttgccagtttctcttccgcgtgtttgatcagcgtgctcccgcctttttgatcacgatatccttcaagcgttgccatgcctctcagccgatatgctggggattctgttattaatggctgattttgcggggaaaaagaagcgatgctgatcagctttccttcaaaaaacgcgccgagatgaaaggagccttttgcatgatcctcttcatatttgcattgttcaatggattgatggggacgcagaatgcggtgccgaatttcatatgtatcttccgcggaaatggttttgacttcgagcataatgttcctcctcatgactgtttttctatatcgtaacacgaatcccgttgaaaaagaccgcccgattggatcagacagtcttttaagggattaatgcaaaaagatattttggcgctgctcatctttttgctgaatatatgaagtgagctcagcggttaagtcagatctgaggaaaggcgttatcaagtagatgccgttaaacagctcgcatgccgtatccagcagggagcgtgcaattgcaaggccttccgccttttgcttttctttatcttcaccggcatgggccattttttcgcgaatcgtatcagacagcttaatgccgggaatttcattatggatgaattcggcattccggctgcttgtcagcggcatgatgccgatatagatcggcgtcttcagatgttttgtttcgttatggatatcgacaagctgctgctcggaatagacaggctgagaaacaaaataatctgcaccgcaatctatttttttctcaagccgttttaccgctttatccagatggcggacgttaggattaaatgcggcggcaactgagaaattcgttttcttgccgagcggttttccagacagagacagaccttcattgaattgtttgatcagcctgattaaatcaaaagatgttaaatcatatacagacgtcgcaccaggaaaatccccgattttagaagggtcacctgtaatagcaagcacgtcattcagccctaacgtatcaaggcccattaaatgtgactgtaagccgataatgttacggtcacggcacgtaatatggacaagggaacgcatatcgagctgctgcttgacaagggcaccgcaggcaacattgctgatccgcggggtcgccaaagaattgtcggcgagtgtcagggcatcgattcccgcttcttttaattcagcagcagcggacagaaatttgtcaaagctcagttttttcggcgggtccagttctacgataatagagcgttttttcgctgcgatctcatccaggccgggctcggttcgctcgtgatgaacagaaatgaattctttggcccgggttttgacttctttttccgtaatcggagccagtccgccaactgcttccgccatcgccctgatgtgattcggcgttgtgccgcagcagccgccgataatccgcgcaccttgcttacggaattctgacgcgctgttttgaaaatacgtgccgtctgtttcatagacgagccgtccctcttcaagcgaaggaagactgctgttcggataaacggataagaatacgtcatcaaaaattggcacttcgctaagcgcttcaatcatgtgataaggcccgagccggcagttaatgccgacgatatcagccccgagatccgcaatcgatcgcaatgcttcagaaagaggtgttccgtcctgcaatacgccttgctcgtgcatggagacattgagcattatcggaagatcagtctctttgcgcgcgattttcagcacttcacgggcttcttccaaatcataatatgtttctaacagcaagccatccggctcttcatgcagcagcagatacagctgctcgcggaagctgcgcttaatttcgtcaagactgtacgcgtttttattaaatgtgcgtatgccgcccatcgttccaagcacgtatgcatcgcctgctgaagcccgcgcgatctttacggcctcctgattcatttttttgatgtcatcctcaagcccgtgtctggataatttaatatagttggccccgtacgtattcgtttgaataatgttggctcccgcttcaacgtacgctttatgtatgcgctgaatttcctccggctttgaaatattgagctcctcaaaacacctgtcaatgccataggagtagaggagcgtccccatggcgccgtcaccgattaacacctgtctttgcaaatcttctaaaagtcccattgtctgcctcctttattcacatcagcaaggaaaaaagagaaataaaaaaagtcctcttaagaagaagactttgtcagtgattttgtctcttcttatcttccaagctgttcgagcttgctggatttagcaccttggtcatggctgatcgccattacaccggttgctgaagcttcgtcgggccagtccctctgcttctcttgataagaacggatatgaaattttcgtgtcaggaagtgccaaaagatatctggcgtttttccctttctccaaatttaccgaaaataaagacaataatcaataggaatcagaaaatttatctgaaatttataaattgaacgtcaattggcagatctgctccccgtacagctgagataatctgctgcaggtcatctttgttttttccggtgacacgcacttgatcatcctgcacctgagactttactttcagtccggagtttttgatgatcgtattgattttttttgcgttgtccttgtcaatgccttgaacaagctttgcacgctggcgcaccgttccgcctgacgcgttttcaaccttgccgtaatcaatgttttttgtcggtacgtttcgtttaatcaatttgctgaccagcacatctttcagctggcttaatttgaattcgtcatcggaaacgaggaccagctcctctttatctaaagaaatgtcgcttttgctgcctttaaagtcatatcgggtactgatttccttcagtgcgatttggattgcgttttgcacttcaggcaattccaccttggatacaatatcaaatgaactttcttttgccatatgaaaacctccataacatttaacttatgtgttgattatagtagaataaagagaaacttccaacagaacaaagaatcaatttgtgatgattggaaaaaatgttaacaaaatccgcagagaataagcggaacaggaaggacgatagcatgagaccagggcagcaattaaccttgagtatagatcaccaaaccgacttcggttactttttaaccgatggggaagatacgattctcttacataacagtgaaatgactgaggatatcgaggacagagacgaagtagaagtctttatatacgtagaccagcaggaaaggcttgcggccacgatgaaaattccgatcatcagcgcggatgaatatggctgggttgaagtggtggataaagtggaagatatgggcgttttcgttgatgtcggtttatcgaaggacgcactagtcgcaactgagcatttgccgccgtacgaagatgtctggccgcaaaaaggggacaaactttactgtatgctgaaggtgacgaaccgggggcgcatgtttgcgaaaccagcgccggaagatatcatcagcgaactgtttaccgacgcttcagaagatctgatgaataaagagctgacaggtacggtgtacaggctgatcgcatcgggttcattcgtgatcacggatgacggtatccgctgttttattcacccgtcagaaagaaaagaggagccaagactgggttcaagagtcacaggccgggtgattcaagtgaaagaagacggttcagtcaacttgtcgctgcttccgagaaaacaggatgcaatgtcagttgatgctgagtgcattctaacgtatatgagaatgagaaacggtgccatgccgtacagtgacaaaagccagcctgacgatatcagagaacgttttaatatgagcaaagccgcctttaaacgcgcgctgggccatttgatgaaaaacggaaaagtgtatcaggaaaatggatggacatacgagaaaaaatagcatgaaaacggctcgcctgcagcagactgcggagcgagccgtttttttatgtctagtttaattcatcaaccagcgttctgattgccatttcgcgatccacattgtctgaaatcgcaatcggcgtaatatcaatggcgagaatgatcagaatcagggcacctgctgcagcaacataagaaacataatagaaatagttagcggtatcaacagtgttgacaagctcggcctgaactctggatgtatcatccttagaagcggcgatttcctttgcagcttctactttttcttcaacgatttgacctgcttttttcagcagttcatccactttcaatgcatctttgctgtaaacagctttcttcaggttatcaaaaaagtcagcatcctcttttttaatatcagcgacaacctgattggcaaaagcctttgcctgttttgtgttgagtttgtctgtcatcgctttattaaagacctctggaagctgtttgccaacttccccttgggcaaacacaaagcctttaaaaatttcctcacctgaatactcaagctgctttgcctgtgccacactttcttgctgcttcaccaaaaacacagtcgtcaccaatacaaccgacaaaaatactagaaacgccttcttcaaactgaaacctctcccttcttgtgttttttattccacaacagtctgcgaatatatgtaaattgaatcgtggaatcgataggagtgagatacaatatcaaaatgccggccatgataatcgaaaaactgatgaggcccagcatgactgcaaaaatctcatgcataaaaacagcgatgatcaaaatcaatctccaatgcttcttcggcgcaaacagtgccgcgaagatgacaatttgaaccagcagcgtcccccatgtcggaatcaccacgaacggacttgttacaattggcttcgttaacgcctgaaaaaagccgttgaagccaatggttttttcctgggcgaaataatagacggccgttccgtccacccattcctgctgagatagcttagcgacggtagagtgaaaataaagcaccgccacttggattctgatcacaaaataagaaataaaagctgttatttttccaagtgttcttttgccctctataggtctcgtactccaatgccattttctcggatcggtcagcgtgatgggaagcaataaaaaggtcatgactgctgctgcctgctcgcctccgtcgatgacgatcagcgatgactgcaggctgtaactgacataccaatgcagaaccccggtgattctggggcgccagccaatgacaacaagcaccagaatggcaatgcagacccatctgaaaagatttaacatcatatagttattttcgccgagacaaaagagactgagattcattttacaagctggatagctgctgatcccgctggctggcttcataatgaggctcgggtgattgatgagcagcgtcagcaggctggatagcgcaatgatgcttcgcgcgaggccatatacatttgtccacgggtttctttcgtcccatctggtgatggtctgttttatgttttcgagcatgagatcacaaccttgactatgctttttacctgataagacgaaggggtatatttagaatagctccaaggaacaatatcctctttcgtcaaatagtagctgccacaaagcagcgggcggggagcgggtgtttttaattgcacggttttggctttgcttttgcatgcgccgaggtccttttctttacatgctgtccactgttccttgccgacttggctgtagatcacgcccatttcaacgccttgtgaccgcccataccgatacaggccgaataggttgtcagccctcatattgggccatctgaccttggcgctggcattttcagcctcatataagccgattgcagtatcacgcggatttttgctaaaaaagccccagccctgagggaggatgctggacatgagaaatttggagtcctttgtcagcggaatcggggttgtccctaagctgccaataatagaaaacagaaatagcgaaccccaaaggattgaaaaaatgacaaaaaatgatatcgatttctgcattcgactgctccttttaacctgaagaatcgtttttacacttttcataatataaaaacatttatgtaataaaaaggttaaaaagtatgagaaattccatttttgttaaaaggaaaaacaggacattttacactgctatatgtgattgatatatagtgtttttttcgatatatttaaaccatgaaaacgaatcaagttaatgaccgctggattgttcaatttcgaaaagggattttcgagctggccatcctatccctactgcattctaaaccgatgtacggttatgagctgacgtcatccttaaaaaccacctcggctctggctatttcagagggagcgatttatccgattctgaaacgtatgaccgagaagggatggatcgaatttttttgggaagattcactggacggcccgaaaagaaagtattacaaaatgacacaaaaaggagaagaaatgttaaaagaacggctggagaaatacctggaaacccatcaagccttactgtctttatcgggggatttgctatgaatggacagcttatcattgaccgatacatggaggaactaaatgcagagctggagaatatgcctgatgtagagagagaaaacgctatcgacgaattaaaggggcatatcaccgctttcgttcaagacagaatcaaagccggccttagtgaagaggaactgcaggaagctgttgaatctgaattttctcatccgaaggagcttgccgaattgatgatgggtgatgggggagagacgaaaaggaggaggtctttattgggcaaaagctggctttcggtccttctcattgtcacgattatcgccctgccgctgctgccgtccgacttcagacatctgccgctggctgtttatttaatggtgctcgccggatatgtatggaagcggaaaaaattgatgatgtttgcaggtgtcagaaaaaacaaaatgcgctctcaaaaggagattgttacgatttcgcgagtcggtgcggtttatctgctgtttttagcagtggtgcttcttttgagcccgttcctcaatgcgcttgtcgtcctgctgctgattgcagtaagctgcgccgctttttttctttttcttaacatcaagtaatcttgtaggaggctgtaagatggaaatcagcatcaattatctattaattgtcatcgcgcttttattctttgtggttgcctattttgtcggaatcaaaaaacaaacctggatgctggctgggtttaacgaggcgcgtatacgggataaagaccggctggccagaatagcaggctactttttcttgaattccggtttgttcattttgctgaatagttttatctcatttcaaggtcaggagcagctcatacctccgcttatactggcatatggagcaggggttattatttatgtcaataaaaaattagtagagtagaaaaagaagggcagagcgaaatatctctgcccttcttttttgggaaaataagaacgaagcaccacatacaagtttttgtatttttgataggatgaagaaaaatggtagattccaaaataggaaggatgtggtgttttgcgcaacctgaccaagacatctctattactggccggcttatgcacggcggcccaaatggtttttgtaacacatgcctcagctgatcaaagcatcaaatacgaccatacgtatcaaaccccttcatacatcatcgaaaagtcaccgcagaagccggtacaaaacacaacccagaaagaatcgctattttcctatcttgacaagcatcaaacgcagtttaagctcaaagggaatgcgaacagccattttcgtgtttcgaaaaccataaaggatccaaagacaaaacaaacgttttttaaattaacggaggtttacaaaggaattccgatttacggctttgaacaagcggtcgcgatgaaggaaaacaaacaagtgaaaagtttctttggaaaggtgcatccgcaaatcaaggacgtctccatcacaccgtctatttctgagaaaaaagcaatacatgcagcaaggcgtgagctcgaggcttccattggaaaaatcgaatatcttgatggggaaccaaaaggcgaattatatatctatccacacgacggtgaatatgatctcgcctaccttgtgagactctcgacatctgaacctgagcctggctattggcattatttcatcgatgccaaaaacggaaaggtcattgagtcctttaatgccattcatgaaacggcaggtacaggaatcggcgtatcaggtgatgaaaaaagctttgacgtcagagaacaaaatgggcgcttttatttggctgacgaaacaaggggaaaagggatcaatacatttgacgcgaagaacctgaacgaaaccttgtttacgcttttgtctcaactgatcgggtatacgggcaaagaaatagtcagcagcacgtccgtatttaatgaacctgcggctgtagacgcacacgcaaatgcgcaagccgtttacgattattacagcaagacatttggccgtgattcttttgatcaaaacggagcaaggattacgtctaccgtgcatgtcggcaaacaatggaacaatgctgcgtggaacggtgtccagatggtatacggggatggagacggttcgaaatttaagccgctgtctggatcgctcgacattgtcgcgcatgaaatcacacacgcagtcacacagtattccgccggtcttttatatcaaggagaacccggtgcattaaatgagtccatttctgacattatgggcgcgatggctgaccgtgatgattgggagatcggcgaagatgtctatactcctggtattgcaggagattcattgcggtcattggaggacccatctaagcagggaaatccagatcattactcgaaccgctacacaggaacagaggattatggcggagtccatatcaattcgtccattcacaataaagcagcttatcttcttgcagaaggaggcgtgcaccacggtgtacaggttgaagggattgggcgtgaagcaagtgaacaaatttactatcgggctttaacatattatgtaacggcatctacagatttcagcatgatgaagcaagcggcgattgaagctgccaatgatttatacggtgaaggctcgaagcaatcagcttcagtcgaaaaggcgtatgaggctgtcggcattctatgagcaaacaaaaacagtcaggacacagagtctgactgtttttgtttgctcattttcttaaaaagaatatcgccaatgtacctggaccggcatgcgagccgattgctgaactgattggatgcataatgatttctttcggcttgaacgcttcctcaatcaggtgtttcatgtccgtggctttttctttgttcgcggcgtagctgatcccgacggtttgatcgctccaatcatccccgcgctctttcataagctcgatgatccgtttgaaaagtttcttctgtccgcggattttttccagaggcacaagcttgccgtcctccatctgaagcagcggtttaatattcaacaggccgccgacaaaagcggacgttttggatatccggccgcccctcgcgagatatgttaaatcatcaacggtaaaaatgtgttcaagctggctgcaaaagttctttacagacgtttcaatttcttgtattgtattcccgttgatacagagatcggcagcatgccggacagccagaccgtatcctaatgaagcgcatttggaatcaatgacccgcaaatcgaaatcggggaattcctccttcacttcattggcgatcattacagctgtctgatacgtgccggagagacctgaggaaaaggcaatgtaaagagcgggatcacctgtttcggcatattgcaaaaacacatttttaatcgtttgcggtgaggcttgggacgtcttaggcgtttctccattttgcatcgcttcaaatatttgatccgcatgaattgtgactgcatcttcgaattctttatcgccgagagaaaccctgagcggaataaagccaatgcctttttcttcaaaataagaacgaggcaaatcagtggcgctgtcagcgatgagatgaactgtcatattgcttcccttctttccgttatcgctcgttatcatgagagttaagccaactatatcatattaatttgccaaaatcgtgttcaaatatttgttttaagggaaaacataataaagaagaaagagcggaggaacatgccatggtactagatcaaacaaaaaaattactcatcgtcatcatcggcgctttactcaatgctgccgggctgaacttatttttgattccagcagatgtatatgccagcggatttacaggtgttgcccagcttttatcaagcgtcgttgatcaatatgcccccttttacatatcgacgggaacgctcttgttcctcttaaacattccggtcggtattttaggatggctgaaggtcggcaaatcgtttacagtgtacagcattttaagtgtcgcactcactactctgtttatggggatcctgccggaaacaagcctgtcacatgacattttgctgaacgcggtgttcggcggcgtcatttccgcagtcggtatcggcttaacattaaaatacggagcttcgacaggcgggcttgatatcgtcgccatggtgcttgcaaagtggaaggataaacccgtcggcacgtatttcttcattctgaacgggattatcatcttgacggcaggattattgcaaggttgggagaaagcattatataccctggttacactatatgtgacaacgagggtgatcgacgccattcacacccgccacatgaagcttacggcaatgattgtgacgaaaaaagcggacgaaatcaaggaagccatttacggaaaaatggtgcgcggcatcacaactgttccggcaaaaggagcttttacgaacgaacagaaagaaatgatgattatcgtcatcacgaggtatgaactgtacgatttagaaaagatcgtcaaagaagttgatccgaaagcatttacgaacatcgttcaaacgacagggatttttggtttctttagaaaagactgacgaaagcaggtggaagtcgtgaaacggctgcttgtgatgctcctccccgtgctgcttttgataggctgcgggaaagatgagcagacagaacccgataaggaggtatcaggcggaatggagaatcaagaggttgttttatctattgacgcaattcaggagcctgaacaaatcaagtttaacatgtcgctgaagaaccaaagcgaacgtgctattgagtttcaattcagcacagggcaaaaatttgaacttgtcgtgtatgattctgagcacaaagaaagataccgttattcgaaagacaaaatgtttacgcaggcttttcaaaacctgacgcttgaatctggagaaacatatgatttctctgatgtgtggaaggaagtcccggagcccggaacctatgaggtaaaggtgacatttaagggcagggcggaaaatctcaagcaggttcaggctgttcagcagtttgaagtcaaataagaggctatggcgagtcgccatagcctttttttattggagtttgtccagctgattttgaaattgatgcagctgttgacgttccgcatctgtcgaattggcatacgcagaagatacagcatttttggctctcagaatcgcttgctcctgatcgccttcctcaaagccgtttgtcaccatgaccgcctgttgaacaaatgattttgcctgctgaaacagttcatttctcatttaatattcaacctggctttcggccgagtctcgtgccgcggcatgctggtgagcttcttctaaagtagaccgatatggaaatcttgcggcgtgtagcccgatggagtctttaccctgctgaataaaccttctggatttgcttcgtttacccattttgagactgcccccttccatactttgacgagatgagtcgtcttcaatagtatggtggggcaaagtaaggtttatgagtgggaaaaattaatacggaccttctttaaagtgagaaatattctttcaaaaatcttgcaacgccgtcctcttcatttgtagccgttgttcggttggcaatctgcttgaccgcgtcaattccatttcccattgcaacgccgcagcctgcaaattcaagcatttccaaatcgttatcctcatccccgaaagcaatgatccgctccctcggcacgccgtaataatcgctgattttctgcaggccgaccgctttattcatgccgcttttgataatttcaatgacatgccacggtgcggcccatcttctatggtcgattacctcggcatgcacatccgataaatatgagcgtattgccggcacatcttcttcttttgcatgtatgagtacagacgtcacatcttcaccaagattttcccgcaagtctccgaccgttacatttgttgtgttcatgttaaaggcatctatcaggtgctcatcatggtaatgaaagtatacgtcgtcaatcacttcagcaagcacgttatgtacgttgtagctctcgctgatatccacgagctgtttgacaacatcaagcggcagtgacgtatgataccgtccccagctgtcgtcttgcggatgatggacaaatgctccgttaaaattgacaattggcgttgtcagctccatctgctggtagtacatggaacttgaacgatacggacggcctgttgagatgcagacataatgcccgtcatcttttaggcgctgtatcgtatgaagggtgttttcagatatggttttatcatcctttaataatgttccatctaaatctaatgcgattaaatagggttttgtctccatgaaaagctcctttaaccttagattttgcttgttttgccttacttacagtgtagctttttaccatctttattgtctacatgttacacttatgattatggttatcctaaggaggggcacattgtgatacaaattgagaatcaaaccgtttccggtattccgtttttacatattgtaaaggaagagaacaggcaccgcgctgttcctctcgtgatctttatacatggttttacaagcgcgaaggaacacaaccttcatattgcttatctgcttgcggagaagggttttagagccgttctgccggaggctttgcaccatggggaacggggagaagaaatggctgtcgaagagctggcggggcatttttgggatatcgtccttaacgagattgaagagatcggcgtacttaaaaaccattttgaaaaagagggcctgatagacggcggccgcatcggtctcgcaggcacgtcaatgggcggcatcacaacgcttggcgctttgaccgcatatgattggataaaagccggcgtcagcctgatgggaagcccgaattacgtggaactgtttcagcagcagattgaccatattcaatctcagggcattgaaatcgatgtgccggaagagaaggtacagcagctgatgaaacgtctcgaattgcgggatctcagccttcagccggagaaactgcaacagcgcccgcttttattttggcacggcgcaaaagataaagttgtgccttacgcgccgacccggaaattttatgacacgattaaatcccattacagcgagcagccggaacgcctgcaatttatcggagatgaaaacgctgaccataaagtcccgcgggcagctgtgttaaaaacgattgaatggtttgaaacgtacttataaagcacgaagttattaacaagagctgaatttacgttatactgtagaaaaaaggagtgagggaacgtggaagaagcattaaaagaaaacatcatgggcgccctggaacaggttgtcgatcctgagcttggcgttgatatcgtgaaccttggtttggtatacgatgttgacatggatgaagacggcttaacgcacgtgacgatgacactgacatcaatgggatgccctttagcgccgattatcgtggatgaggtgaaaaaagcattagcggaccttcctgaagtgaaagacacagaggttcacattgtatggaatccgccttggactagggataaaatgtccagatacgcaaaaattgcgcttggcattcaataaaacaaaagaggacagcctgacatgtgaggctgtccttttttacagctgaaaggagtgaaaggaaatgatgtacctgctggcagttttatgcccgccgcttgctgttttgttttcgggaaaaccgtttcaggccttgctgaatctcatattgacctgtatcttttggctgccgggcgcgattcacgcctgctttatcgtcgccgaccgccgtgccgaaaaacgggcaagaagataatttgggaaaatgaggatgcagtcatggtataatggtcataaaaacagcagggagagcactatgaaaaagaaattgcttgcattcgcgctttgtactggcgcgtatgcggccctgtttgcgtactctgtgcactcagagcaaaaaacagacacaagcgagatgacggatgtcagccgcctgatgcctgtaaaaataaagcagacagtgaaagggcaggaagaggaaacgctcattgacacagtcaaagaggcaaatcgaaaaaacataaaaatttcaatcgccggggcccagcactccatgggcggccatacatattatgaggacggcatcgttctcgacatgacgggctacaacaaaatcctgtcactcgatcaagagaagaaaaccatcagggtgcaaagcggtgcaacgtggaatgatatccagaaatacgtgaatccatacggactcgcggtaaaagtcatgcagtcacaaaacatttttacaatcggcggatctctcagcgcaaatgcacacggacgtgatattcgctacggctcgctgattgatacagtcaaatcattccggcttttaaaagctgacgggacgattatcactgtcactccaaaagatgatttgtttacggcggtcatcggagggtacggcctttttggcgtgattcttgatgtaacgcttgagctgacagatgatgagctgtatgtcatgaagacagaaaaaatgaattacagcacatactcagactatttttcaaagcatgtaaaaggaaatccagatgtccgaatgcatctggcgcgaatttcaacagcgaaaaaaggatttctgaaagacatgtatgtcacaaattacgtattggctgatcatcaggatcagctgccatcatacagcgatctcaaagaagatgagtatacgggagccacaaagtttgcactcggtttgtcaagacagtatgaatggggcaggaattggctgtgggacacacagcaatcctatttcctgagccaaaacggcacagagatttcacgcaataacgtcatgcggtccgaatcaaagtttcttgagtatgaaaacaatgacaacacagatgttttgcaagaatactttgtgcccgtgaaggagtatgggtcctatattgatgacctgagacaaacgctgtcggacgaagatctgaacctgctgaacattacgatccgctacgtgcagaaaaatgaaaaggccgacctttcctatgcgaaggacgatatgttttcgctcgtgctattaataaacgagggcttttcaaaagaagaccaggcagataccgcccgaatcatcaggcgcatgacagacgttgccatcaagcacggcggcagctattatctgccttatatgacctaccagacaaaagcgcaaatgagacaggcatatccgaaaagtgaagcgttttttcagaaaaaacgaacctatgacccgaatgagcgctttatgaattacttttatcagaggtataaataatggggaaaaacaaattaaaatggctgacattatcacaaagcagcgtgtttttcgcaagcagcttaatctttccgttttatattctgtttgtgaaaaatatcggctcaagctacacacagttcggtttttcctacggattgttcgggttgagcggagcgctcatttacccgctcctcggacggctgtctgaaaggtttgacagccgttattttctgcttctgaactcgtgggggatggctgttctgcttttatatgtcccgcatatcggaagcgtcgttcaagtgtatatcgtccaagtgctgttagggctctttggagcgatgcaaaagcatggagaaaaagtgctgatcgctaattttacagacagcggagagcgtggaaagaagattgggaattaccatttttggacggctgtcttttcagcagcagcaattatgcttgggggctttctcgctgactttttcacagtgcaaatgattttttatgcaagctctattctatattttttgagtggattgatgatgatgaaaacaggctgacgcggtcagcctgtttttttatgcggctgaaaagcggtgctgcatcaacgtttttgtgctggagttgtgctgatttttttgagcggaatttccattgaacagaaaatttataaatgaataaaaatattaaatatacgattgaattaatttttattcatgttataatgttaaataatttcacaaagaccaagagggtgaacttgttttgaaaataggaattgtaggtgctacaggatatggaggcaccgaacttgtcaggattctctcgcatcatcctcatgcagaggaatgcatactttattcatctagcggagaagggaatgtctatagcgagggttatcctcatcttaccggcttagcggatcagaagctgaagccgattgatatgaatacgatcaaacacgaaatagatatcatgtttctcgctgcgccgcccggagtctcaagtgaattgactccaaagctggcagatgtgggaattccggttattgatctgtcaggtgatctgaggatacaagaaccggctgaatatgaaaaatggtataaacggacagcggcaccgaaggcggtgatacaagaggcggtatacggtctggcagaactgaatcaactgcaaattcaacaggcgaaactcattgccaatccaggctgttttccaacagctgttttgcttggcctcgcgccattggctcaaaagaaactgctcgatgaatctttcgttatcgttgacgcgaagacgggtgtttccggagcgggaagaaaagcatccatgggaacccatttttctgagctgaacgacaattttaaaatttacaaagtcaatgaacatcagcacacgccggaaattgagcaggcgctgaatgaatggcagccaggcctcgggcccattacattttcggctcacttggttccgatgacaaggggcatcatggcgacgatgtataccagattaacctgtgatctatcagcagatgacctgcatgatttatattcggaattttaccaagattcatattttgtgagagtgaggccaaaaggtcagtacccgcaaacgaaagaagtgtacggcagcaatttttgtgatatcgccgtgaccctcgatgagagaacgaacagagtcacgatcgtctcggtaatcgataatttaatgaagggtgccgccggtcaggcagtgcaaaactttaatttgatgaatggctggaatgaagaaactggactcactatcacgccaatttatccatagaacgggagagaatcgaaccatgattcagttaagtgaagatcaaattgtaaaagtaacaggggatgtatcctcgccaaaagggtttcaggcaaagggtgtgcattgcgggctgcgctactcgaaaaaagacctcggcgtcattatcagcgagacaccggctgtgagcgcagcagtttatacccaaagccactttcaggctgctccgatcaaagtgacactagacagcttaaagcacggaccgacactgaaagccgtcatcgtcaacagtgccattgccaatgcctgcacgggagaacaaggcctaaaggacgcatacacaatgcgggagagttttgcttcacagcttggcattgagccggagcttgtcgctgtttcatcaacgggtgtcatcggcgagcatttagacatggaaaaaatccacgcggggatcgagctgctgaaagaaacacctgcgggatcaggcgattttgaggaagcgattttaacaactgatacggtgatcaagcagacgtgctatgaactggcaatcggcggcaaaacagtcacgatcggcggagcggccaaaggctctgggatgatacacccgaacatggccacgatgctgggatttgtgacaactgacgcggcaatcgaagaaaaagcgctgcaaaaggcgcttcgggaaatcactgacgtttcatttaaccaaatcacagttgacggagaaacatccacgaacgacatggtattagttatggcgaatggctgcgccgaaaacgagtgcctgacagaagaccatccagactggccggtctttaaaaaagcgctcttgctcacttgtgaggatctagctaaagagattgccagagacggagaaggcgcgacaaaactaattgaagcccaagtacagggagcgaaaaacaatcttgatgcaaacgtcattgccaaaaagattgtcggctcaaatcttgtaaaaacggcagtatacggaacagatgccaactgggggcggatcatcggagccatcggacactccgcagcacaggtgacggcagaagaagtagaggtttatcttggcggccaatgcctgtttaagaataacgaacctcagccattctctgaatctatcgccaaggaataccttgaaggagatgaaatcaccattgtcatcaagatggctgaaggggacggaaacgggagagcgtggggctgtgacctgacctatgactatatcaaaattaacgcgagctatcgcacgtaataaaggggagcgaaatgaagaaaacaatcgtttttaaatgcggtggaagtgtcatccgtgagctgtcggaggaattttttcaaaatctgaaagagctgatggcgtcaggctggaagctggcgatcgtacatggcgggggaccggaaatcacgaatatgctgaaacggttaaatatcaagacagagttttcgggcggacagaggaaaacaacgaagccggtgctggaagtggcggaaatggttttatccggttctgtcaataaatttttcgttgctgagcttgccaaacacggactgcgagccgcaggcatttctggtaaggatggaggtcttttggaggctgattatctagatccggaaacatacggagaagtgggagaaatcaaaaaagtcgatgcgtccatggtgaacgcgctgatggaaaatggcatcatccccgttattgcgccgctgtctatgacaagcgactgcaaaacgctgaatgtaaatgctgatctggctgcttcagcagtcgccggagcgcttgaagccgataagctgatgttcgtcacggatgtcgatggaatcatgaaggaaaagcaacgtctggacgtcctgacccctaaggagattcagatgctgatcaagcaggaagtgatcaccggagggatgatcccgaaggtcaattcagccttgtcagctttatcagatcaggtgtctgaagtcatgatcgtaaacggaaaaggttcattcttcgcagaacaaacctttcaggggacaaaaatcgtcaaagcaaaggaggctgtttcatgagcagcttgtttcaaacctacggccgttgggatattgacatcaaaaaagcaaagggaacgtacgttgaggatcaaaacggcaaaatgtaccttgatttcattcaggggattgcggtatcaaatctaggacactgccatgaagcggtgacagaggcagtcaaaaaacagcttgacagcgtatggcacgtatccaacctgtttcaaaacagtctccaagagcaagcggcgcagaagctggcagcgcatagtgcaggagatcttgtctttttctgcaacagcggcgcggaggcgaatgaaggtgcgataaagcttgcccgaaaagcaactggaaaaacaaaaatcatcacttttcttcagtcgttccatggccgcacgtatgcagggatggctgcgaccggacaggataaaatcaaaacaggcttcggcccgatgcttgaaggctttcactacctgccatacaatgatccttctgcttttaaagctcttggggaggaaggcgatattgccgcggtgatgcttgaaacagtgcagggagaaggaggagtcaatccggcgagtgctgaatttttatcagccgtacagtcgttttgcaaggaaaagcaagcccttctcatcattgatgaaatccagaccggcatcggacggacgggaaaaggcttcgcatatgagcacttcggactctcaccggatatcatcacagtcgccaaaggattgggaaacggctttccggtcggcgctgtcatcggaaaaaaacagcttggagaagcgtttacccctggttctcacggaacgactttcggaggaaacatgctggcgatggctgctgtgaatgccacattgcaaattgtattccagcctgactttttgcaagaggctgctgacaaaggggcgtttttaaaagaacagcttgaggcagagctaaagagcccttttgttaaacaaatccgaggtaaaggattaatgcttggaattgagtgtgatggcccggttgctgacattattgctgaattgcagacattaggcttgcttgtattgccggccggcccgaacgtgattcggctgctgccgccgctcaccgtgactaaggatgaaatagcagaagccgtcagcaagctgaaacaggcaatcgctcatcattccgctgtaaaccagtgatttttttttcgatgtaaaggcataaaaattcatttttataattaattattcatcaagaggtgggctgttagatggaaggttatttagtgttagaagatgggacatcgttcagcggcgagctggacggtcatgaaaactgtacgggagaagctgtttttttcacaggaatgacaggctaccaggaagtgctgacagatccatcatataagggacagattattgtatttacctacccgctgattggcaactacggcataaatgaaaaggattttgaaagcaagaaaccgcaagtaaaagccgcggttgtctatgaggcgtgtgatcacttttctcattatgaagcggtatacagcctcaaggagtatttacagaaatggaacattccgctgttaacccatgttgatacgagggctgtcgtgaagaaaattcgggcaaacgggacgatgggtgcaacagtcacagcctctaaagaaggagctgagattgcccttcaacccgagaatgtggcagagcaggcttcagcccaggaaatcagcacattcggcgacgggaataaacatatcgctctcattgattttggctataaaaagtcaatcgcatcatcacttgtcaaacggggctgcaaggtcaccgtggtgccatacaagcaaatggaggccgtatacaacatcaaacccgatggcattgtgctatcgaacggacctggagatccgaaagccattcagccatatttaggaaagatcaaaagcatcatcagccgctttccgactctcggcatttgtctcggacatcagctgatcgcgctcgcgtttggagggaatacttttaagctgccattcgggcacaggggagctaatcatccggtcatcgaccgtgagacgaaacgggtctttatgacaagccaaaaccacagctatgtggttgatgaacagtcgattaatgaagaagagctcacgatcaggtttcatcatgtcaatgatacgtcagttgaagggcttgcccataaaaaactgcctgtcatgagtgttcaattccacccggaagcccatcccggacctgcggaaagcgaatggatttttgatgattatctaaagaatgtgataccagcaaggagagaaatcgcgcatgcctaaagacaccagtatttcaagcatattagtaatcggctcaggcccgatcatcatcgggcaggcggcagaatttgattattcaggcactcaagggtgcatcgcgctgaaggaggagggctaccgggtcattctcgtcaacagcaatccggcgacaattatgactgatgaagccttcgctgatgaaatttattttgagcctctgacagcagaaagcctgacagccatcattaagaaagaacggcctgatgggcttcttgccaatttaggcggtcagaccgcgttgaatttagcggtggagcttgaagaaacgggtgttttaaaagagcacggcgtcaaactcctcggcacatccgttgaaacgatacaaaaaggagaagaccgggaaaaattccgttcgttaatgaatgaattaaaacagcccgtgccggagagtgaaattgttgataacgaggccgatgccctccattttgcggaatccatcggttttcctgttattatcagaccggcttacacattaggcggaaagggcggaggaatcgcccctgataaagaagcctttacagctatgattaaacaggcgctattagcaagcccgatcaatcaatgccttgtcgaaaaaagcattgccggctttaaagagattgaatatgaagtcatgcgtgacagcaataacacatgcattaccgtctgcaacatggaaaatatcgatccggtcggcgtgcatacaggtgactctatcgttgtggcgccttcacaaacattgacagatgaagactatcaaatgctgcggacggctagtctgaccatcatttcagcacttgatgtcgtaggcggctgcaatattcaattcgcgcttgatcctttcagcaagcaatattacgtgatcgaagtgaatccgcgtgtcagccggtcatcggctctcgcatctaaagcgaccggttatccgattgcgaagatggccgcgaaactggcagtcggatacacacttgacgagctgaaaaatccgctcacaggctcaacttacgcaagctttgaaccggcactggactatgtgatcgtcaaatttccgcgctggccgtttgataaattcaaaaacgcagaccgcaagcttggcacaaaaatgaaagccaccggtgaagtgatggcgattgaacggaatttagaagcagcaatacagaaggcagccgcgtcgcttgaattaaaaaatatcgggacacaccttccagagctcagcggcttgtcaattgatgcgctatgggagttggcagtcactccggatgaccgcagatttttcgttgtcatggagctgttgagccgcagcgtctcgattgatgacattcatgcgaaaacaaaaattgatccgtttttcctgtatacctttaacaacatcatcaaattggaaaaccgcctgatggaagagggcggcgatctctcttttgacttattgaaaaaagcaaaggaaaaggggttctcagacgcaacgattgcctcattgatcggcaaaacagaggaagaggtgcgcgcgcttcgcaaggagatgggcattacaccttccttcaaaattgtcgatacatgcgcggctgagtttgatgcgaaaacaaactatttttactccacatatttcggagagaccgatggagatatcagccgcaaagagaaaaaacgcgcgctgattatcggatcaggaccgattcggatcggccaaggcgttgaatttgattacagtgcggttcacggcgtgctgacactgcaagagcttgggttcgaaaccatcatgattaacaataacccagaaacggtcagcaccgattatgaaattgcggatcgcctgtattttgaaccgatgacaacggagcatattgtaaacgtggcggagcaggaaaatattgattttgcaattgtgcaattcggcggccaaactgcaatcaatgctgctgaagcgctcgaaaaagccggcattactcttcttggcacatcatttcaaacgctcgacgtgttagaggatcgggatcaattttatcagcttcttgacgagctgggattgaagcacgcaaaaggagaaattgcttatacaaaagaagaagccgcttcaaaagcgagtgagatcggctatccggtgttaatccgcccatcttacgttatcggcggaatgggcatgatcattgttgactcgcaagcccagctttctcagctgctgaatgatgaggacagcatgccatacccgattttgattgatcagtatgtgtctggaaaggaagtcgaaattgatatgatttccgacggcgaggatgtctttatcccgacatataccgagcatattgaacgggcaggtgtccattcaggggacagctttgccattcttcccggaccgtccatcacgagcgggctgcagcagggcatgaaagatgcggcacaaaaaattgcccgaaaactttcatttaaaggcatcatgaacattcaatttgtgatcgacaatggaaacatactcgttcttgaagtgaatccgagagcgagccgcacggtgcctgtcgtcagcaaagtaatgggcgttccgatgattccgctcgccacacgactgctggcgggagcgtccttaaaagatctaaatccggaagttcaaaatcatcatggagttgccgtgaagttccctgttttttcttctcatgcaatccaggatgtggatgtcaagcttgggccggaaatgaaatcaacgggagaaggcatgtgtgtcgcatatgattctaacagcgccttgaaaaaaatctatacaagagtctggagtcaaaaaggaagcatttatttgcaaaacgttccggaagaagtgaaggagttagcagaaaacgcaggttttacaattcatgaagggacatttgcctcatggatggaacaggaaggaaaatcgctccacatcaatctgagcggttctgaagaagcacgcaaagaacgtttggaagccatgacgcacggcatccccgtctttacagaagaagaaactgtgcgggcgtttttacaaagcggttcaggccatccgcagcctgtatctctcaaagacctctataaaaaggaagtggcatcatgcacacagtgacgcaaaccagtttatacggaaaagatttattaacgttaaaggaccttagtgaagaggatataaacgccttgctcgcagaagccggtgagctgaaacaaaacaaaattcagcctatattccatggcaaaaccttggcgatgatttttgaaaaatcatcaacgcggacccgtgtttcatttgaagcgggcatggcgcagctgggcgggaacgccctctttctaagccagaaagatctgcagctggggcgcggtgagactgtcgctgatacggcaaaagtgctgtcaggctatgtggatgccatcatgatccggacctttgaacatgaaaaggtggaggaacttgccaaagaagctgacattccggtgatcaatggacttaccgataaataccacccatgccaggcgctggcggatctcttgacgattaaggagataaaagggaagcttaaaggcgtaaaagtcgcatacatcggtgacggaaataacgtggcgcactccttgatgatcggctgcgcgaaaatgggctgtgatatctcgatcgcttcgccaaagggatatgaagtgttagatgaagcagctgaagcggcaaaaacatatgcacttcaatccggctcttctatcacgctgacagatgatccgattgaagctgtaaaagacgcggatgtgatttattctgatgtgtttacaagcatggggcaggaagcggaagagcaagaacgtcttgctgtctttgcgccttatcaggtgaatggggcgctagtcagccatgccaagcctgactatacatttttacattgtctccctgcgcatcgtgaggaagaagtgactgcggagattattgacgggccgaactctgcagtgttccagcaggcggaaaaccgtcttcatgtgcaaaaagcactgctgaaggccattttatataaaggggaatcatcaaaaaactgctgagccaaactcagcagtttttttgatggcaacatattcacagccgcttaggcgcatactacagcaaaaaggaaaaggaggaaaaacagtgggacagcagcaccaattccggcccggacagaaagcgcctaataacggtgtctacgtagaaatcggcgagacagggagcatggttaaaaaccctcaaaaggtccatctgtcagcaggggaaatgttccccgaaacatcaaaccacaaccggctgtggacctacaaaagaaagccgtgaccactaaaaaacccaaaacaataaatgttttgggtttttggctttttaatgctggcttgcatttttgttcataggcatgatttctgctaaaaccatgattaagacatacagtacaacagcaatgacagatgatgttttgaaattatacgtaacgctgttcatgcttgcaaccaagtagcatgccatatgtgataaaaggaacgtccaaataaaggcaataatatatcgcacgtttccacctcgtccttctcattctattctaaaagttatcataccatacaaaaagcgaagggggaatccaattttagcagaaagtgaggtgacaaaagagtctgattcgtcacactttaatggtaaaatataaaacgtcaatcagtataatagccaaaaatgtaaaaggctaggactttaccttattcgtttcttttctatttacataagatagcgtgagatgaagtgtgaaaggaggcgggcaagcgatgggaataacggaaagatactttcaactgggaacggagcataatgtcattcatctgccctatcgcccgaacggcttcggcatctttatcttgggggacagaacccactttgtcggacatgattcaagcttttggcagcagcattatggcagaaatcagcttctgagcatgttgatgaatgaaggatacactctttttaacagcaatctgttcggaaggcattggggggcggaaaaagcagtcacctatgccaaacagctgatacattctgtactgaagcaggaaatcctcaatccgaagattcatattttagcagaaggcatgggtgctctcgtggccgatgaactgcttcgtttttccccggatcatatccgctcagccgcaatgttgaatccttgtctcgatcttcaggcacattatgaatcggaaaaagaaaataaatttttctataaacaatttttgaaagaagtatcgaaaagctacggaatttctgaaaaagaagcggaagcgcttcgttataaaacaattcaaagctacccgagcggcgtaccggttcatatatggcagcgtatgaccggatctccatatccctacagtgtacatgcagaagttttcaaggaaaaacagcaaaagcaaggctcaccggtcgacatgacatttcatttatttgagcatccaagcagaatttatgcatcaatttgcaaattctttcacagtcatgaaaaagaattatagagaatataatgacaacagccttctcttttgcggaggctgttttgttttgggaaatgaaaaaccggaagggcggcagatgcaatggaatcaacgctgattgtaggtgcggacgaatttttcggcctttcattatgtgagcgaatgatggatgaaggcatacatgttgacgttgttctggcggaaacagaagataaaatgagacaaatgtacttagaagaaagactcatgtggcttgggagaaatgaactctttcgccagcttgaacacattggagaccaaaattatgatacaatttgtatccagttcggaagttttttgcctttagaccaatgtgattctccttatattttagtatatgaagaagaccgaaaagaatgggaaaaacgtgaaaaaacaggctcggaaaaaaccgtgatcctgccgaaaatgtatgggccatggaaagaagaaacagaggaagacggctattatacaaatgacgtcgctgacgagttgctgagattcctgttagaaccaagccgtcatagcaaagatcagctttttgaattgcaagtcacagaaaaaacctcaaaagaagaagcaaaaacaaaaattatcgagtggaaaagacaattttcatcaattttcgacaaatattaagaaaaaccttccatgtttcgagttttctagatacaataaacgtataaaaataaacatgttatagcttgtcaaaaggagttgaacatgacttgatcacaaggcttgtcatgatcttttctgtcctccttttattgagtggatgtggacaaactccgttcaaaggaaaaattgagaaggtcggcatgctctttcctgatacgattaatgacctcgtatggggcacaaaagggtataaaggattactgaatatacaatccaaatacaatgtggacgtctattataaagaaggcgttaaaacagaagaagatatcataaatgcgattgaggattttcataagaggggcgtcaatctgctctacggccatgggagtgaatatgccgaggtgtttaacttggtcggcgaagattatccagatatggaattcgtcatttccaatgcgaaagcgaaagctgataatgtaacaagtgtccattttagcggggaagcaatgggcttttttggaggaatgactgctgcccatatgtcgaaaacgaatcaggtcggtgtaattgcttcctttacgtggcagcctgaggttgacggttttatcaaaggggccaagtatgaaaatccggatatagaggtaaatacgaaatatacggatcattgggatgatgatacaacagcagtaaagctttatcagaaaatgaagaacgaaggcgcggatgttgtgtatcccgccggagacgggtataatgttcctgttattcagcaaatcaaaaaagacggtctttatgccattggctacgtcacagatcaatcggatctgggcgagaataccgtattaaccagcacggtgcaaaatgtggacaaggcctatgaaatcattgctgaacaatttaataaaggcacccttgagggcggcgatcattactacgacctgaatacgggagtcgttgagatgggaacattcagcccgctcgtcgacaaagactttcagcaaagaatcgccaagctgatcaaaacatacaacaaaacaggcgagctgccaaaaaacgagtaatggagtgacgtcacatgcagcacgaaaaatcacttgaattcttgcaaattgccatgaaatatctccctgaagcgaaagaacagcttgagaaatcaggcattgagctctcaatggaggccatccagccgtttatgaatctatttacaacggtaatggcggaagcttatgagcttggcaagtctgacgctaaatctgaaacagaataagaagaagccacttttttgaaagtggcttttcacatgattttctttttaatagcggagagcatgggcgcaagctcctttaaagcgggcttgatttgatcaagagagttcataattgaaccgatttggtccataatatgcatgtaattaatcgtctcttcgtcgtttgtctgagaaacctgagaaacttcctcttgttgttcctcctccttctcttctgttggttttgctgcatcgccgaacatcattcttgaaaacacatccaactgcatacgcctcctttccatataccatactctatgagtaagatgaactgatagtttagacgaatatattgccatgtgaaaaaaaataggatagaattagtacctgatactaataattgatcacaacctgattgatcttctaaatttaagatataaaggagtcttcccttatgaaagctggaatacttggtgttggacgttacattcctgagaaggttttaacaaatcatgatcttgaaaaaatggttgaaacttctgacgagtggattcgtacaagaacaggaatagaagaaagaagaatcgcagcagatgatgtgttttcatcacatatggctgttgcagcagcgaaaaatgcgctggaacaagctgaagtggctgctgaggatctggatatgatcttggttgcaactgttacacctgatcagtcatttcctacggtctcttgtatgattcaagaacagctcggcgcgaagaaagcgtgtgctatggatatcagcgcggcttgtgcgggcttcatgtacggggttgtaaccggtaaacaatttattgaatccggaacctacaagcatgttctagttgtcggtgtagagaagctctcaagcattaccgactgggaagaccgcaatacagccgttctgtttggagacggagcaggcgctgcggtagtcgggccagtcagtgatgacagaggaatcctttcatttgaactaggagccgacggcacaggcggtcagcacttgtatctgaatgaaaaacgacatacaatcatgaatggacgagaagttttcaaatttgcagtccgccaaatgggagaatcatgcgtaaatgtcattgaaaaagccggactttcaaaagaggatgtcgactttttgattccgcatcaggcgaacatccgtatcatggaagctgctcgcgagcgtttagagcttcctgtcgaaaagatgtctaaaactgttcataaatatggaaatacttctgccgcatccattccgatctctcttgtagaagaattggaagccggtaaaatcaaagacggcgatgtggtcgttatggtagggttcggcggaggactaacatggggcgccattgcaatccgctggggccgataaaaaaaggtgaggtgcacacaagatgactaaaaaaagagtagttgttacaggacttggagcattatctccacttggcaacgacgtcgatacaagttggaataacgcaatcaacggtgtgtccggaatcggtccgatcactcgtgttgacgctgaagaatatccggcaaaagttgccgctgaattaaaagaatttaatgttgaagattatatggataaaaaagaagccagaaaaatggaccgctttacacaatatgcggttgtggctgcaaaaatggcggttgaagatgcagagcttaacattaccgatgagatcgcgccgagagtcggtgtttgggtaggctccggtatcggaggacttgaaacactagagtctcaatttgaaatcttcttaacaaaaggcccaagacgggtaagcccgtttttcgtgccaatgatgattcctgacatggcgacaggccagatttctattgcattaggagcaaaaggggtgaattcttgtacggttacagcatgtgctacaggaacgaactccatcggtgacgcgtttaaggttattcagcgcggtgatgcagacgtgatggtcacaggcggaacagaagcgccgctgacaagaatgtcattcgccggctttagtgccaataaagcgctgtctactaatccagatccgaaaacagcgagccgcccgtttgataaaaaccgtgatggctttgtcatgggggaaggtgcagggattatcgttcttgaagaacttgagcatgccctggcccgcggcgctaaaatttacggagaaattgtcggctacggctcaaccggagacgcttatcatatcacagcgccggcccaagacggtgaaggcggagcgagagcgatgcaagaagccattaaagatgcaggcattgcacctgaagaaattgattacatcaatgctcacgggacaagcacgtattacaacgacaaatacgaaacaatggcgattaagaccgtttttggcgagcatgcgcataaacttgcggtaagctctacaaaatcgatgacaggccacctcttaggagcagccggcggtattgaagccattttctctatcctggccattaaagaaggcgtgattccgccgacaatcaatattcaaacacctgacgaagaatgtgatttggattatgtgcctgatgaagcccgcagacaggaacttaattatgttctcagcaactcattaggattcggcggacacaacgcaacattaatctttaaaaaatatcaatcataatcaagccaaaccggctgcccttaaagggtagccggttttttttgtgtgcataggattaaaagaggaggcgatcacatgagtgtagaacaaacatatagctggctcaggaaggccggttcaatagatgatttggcgcattacattatcccgcttttttcaggtgcggagaaaaagaactggaagggcattctggggcatcttcagcatcatgggatgtttaaaaacataaaagagggtattcagacggtttccaagctgaaggaaaaaggtttttacggacatatccaaaaggaagaacagtacctcaaaaacaaatggcaaggtcctgatgtaccaattgttacgctgccggttgatgaacgaaacaggagaatccgtttagaattcggatcaaaatcaggactcgcctttcaagacaaaatgttcctttttctttcgtcagatttagattttgggtcggtatctgcccttatgacgcatgagtatcatcacgtttgccggttaggtcatctgacaaaagaggaaaaggatgtcacattacttgatacaatcatcatggaagggctggcggaatatgctgtttatgagaggttcggccgaagtcaaacggctgaatggacgacttggtatacaccggaacagcttcaggctttatatgaaaaaaagattgcgccccatcgggatatcaaacgggataatcgattatttccccagctgttattcggcaaaggatatcagccaaaaatgcttggatacgcagttggattcaatattgtaaaaaaatatttaaccgccagcaaggcaagcaccgcagacgggctgtccattcctgctgagacctttttggatgcaatgctttaaaaggataaaataatggaatttcattaataatattacatttatcctaaaaaattcttgattttgcaaaatgattgtaataatatacaactataaaatttttcgataattcaatattatttattatttctgaataaagggattgctttctcttgaaaacgtttgacaacaagaggggggaaaggggagctagcatgagcacacttttagaagtgaataatttaaagacttattttttcaggaaaaaggagccgatccctgcggttgacggagtcgattttcacatcagcaaaggcgaaaccgtcgcgcttgtaggtgaatcgggctccggaaaaagcattacttctttatcaattatgggcctcgtccaaagctcaggcggaaaaatcatggacggctctattaaactcgaagacaaagacctcacctcattcactgaaaacgattattgcaaaatccgcggtaacgaagtatccatgatctttcaggaaccaatgacctcccttaatccggtgttaacaatcggagaacaaattaccgaagtgctgatttaccataaaaacatgaagaaaaaagaagcccgtcaacgagctgttgaactcttgcagatggtcggtttctcccgggcggagcaaattatgaaggagtacccgcatcggctgtccggcggtatgagacagagggtgatgattgccatcgcactgagctgtaatcctaaactgctcattgctgatgaaccaacgacagcgctggacgtgacaatacaagcccaggtgctggagctcatgaaagatctctgtcagaagttcaatacatcgattcttctcatcacacacgacttaggtgtcgtgtctgaagctgccgatagagtgattgtcatgtactgcggacaagtcgtagaaaacgccactgttgatgacttatttttagaaccgcttcatccgtatacagaaggcctgcttacgtcaattcctgttatagatggagagattgataaattaaatgcgattaaaggcagtgtgcctacaccggataatctgccgccggggtgccgttttgccccaaggtgcccgaaagctatggataagtgctggacaaatcagccttcgcttttgacacacaaaagcggaagaacggtgagatgctttttatatgaggaagagggtgccgaacaatcatgacagcagctaatcaagaaacaatcttagagcttcgtgacgtaaaaaaatactttccgatccggtcaggcctttttcaaagaaaagtcggtgatgtaaaagcggtggatggtgtttcattttcgttaaaaaaaggagaaacactcggaatcgttggagagtcgggctgcggaaaatcgactgccggcagaacgatgatcagactgtacaaaccgacagagggccaaattctttttaaagggcaggatatttccaatctgtcagaggagaagctgcggaagagtgtccgcaaaaatattcaaatggttttccaagatccatttgcttcgttaaacccgagaaagaccctgcgttccatcataaaggagccgtttaatacgcacaacatgtataccatgcgtgaacgaaacgaaaaagttgaagagctgcttgcaagagtagggcttcacccgtcgtttgccggccgttatccccatgagttttcaggcggccagcgtcagcggatcggcattgccagagcactcactttgaatccagagctgatcattgcagatgagccggtttccgcacttgatgtatccattcaggcccaagtgattaacttgatggaggaattacaggaagaatttaatcttacgtatctatttatctctcatgatctgagtgtcgtccgccatatcagcgacagagtcggagtaatgtatcttggcaaaatgatggaactgaccggcaagcatgagctttatgacaacccgcttcacccatatacccaagcgcttttatcctccgttccggttacaagaaaaagaggttctgtcaaacgtgaacgcattgtcctgaagggagaactgcctagtccggccaacccgccaaaaggctgcgtattccacacaagatgtcctgttgcaaaaccgatatgcaaggaacaaataccagaatttaaagaagctgctcccagccactttgtggcttgtcacctttatagctaatgttgcccgcacagctttgagagggggtatgcacactacataaacaacagcctagaagaacgaacatttcaagagggggaatatctaatgaaaagacggaaaaccgcactgatgatgctaagtgtattgatggttctggccatctttttatcagcctgctcgggatcaaaatcaagcaacagcagcgcgaaaaaatcagcaggcaaaccgcagcaaggcggggatttggttgttggttcaatcggagcgccaacacttttcaactcattatattcaacagatgaatcaagtacagatattgaacaaatgatttacagctttttaacgaaaaccgatgaaaacttaaatgtcaaaatgtcactggcggaaagtgtgaaagagctggatggcggattgaaatatgacgtaaaaatcaaaaaaggcgttaagttccatgacggagaagagcttactgccgatgatgtcgtctttacgtacagcattccgcttaacaaggattacaaaggagagcgcggctctaactttgaaatgctgaaatcagtagagaaaaagggagattatgaggttttatttacgctgaaatacaaagaccctaacttctataacaatacgttagacagctacgggattctgcctgagcacattttaaaagatgtaccggttgcagagcttgaagataacgaatttaatagaaaaaatccaatcggctcggggcctttcaaatttaaagaatggaaagacggacaatacgtgaagcttgttgctaatgatgactactatgacggccgtccgtatttagacagtgtcacgtataaaatcattcctgacgccaatgcagcagttgcccagcttcaggccggagatattgatttctttaacgtgccgtcaactgactataagacagctgaatcgtttaataatgtcaaagtcgtaacagatttagcgttaagctatacgtatatcggttggaatgagaaaaatgagctgtttaaagacaaaaaagtgcgccaggcgcttacgacagctttagaccgtgaaacaatggtgcaaaccgtattagatggggacgggaaggtcgcttatatccctgaaagcccggtttcatggaactatccgaaagatatagaggttcctaaatttgaatacaacgtcaaaaaagctaagaagatgctgaaagaagccggctgggaagatactgacggtgacggcatcctcgataaagacggtaaaaaattcgagtttacactgaaaacgaatcaaggaaataaagttcgtgaagacattgcagttgttgttcaagaacaattgaagaaagtcgggattaaggtaacgccgcaaatcgttgagtggagtgcattagtagaacagacaaatccacctaattgggactatgacgcaatggttttaggatggagtttatcaacgttcccagaccattacgatatcttccattctagccagtctgaaaaaggcttaaataacatgtggtacaaaaaccctgaagttgataagcttctcaaagatgcaaaatcaatcagtgaccgtaacgaatactcaaaagcttacgaaaagatttaccaaaaacttgctgaagatcagccgtataccttcctttactatccgaacaaccatatggcgatgccggctaacttagagggttatgtgtatcatccaaaacgcgagttgtaccaaattgaaaaatggtggcttgcccaataatttataattttcccttgcaggggagggagtgcgtttccttcccctttgaatttgaaaaagaacaacgaaggggacaagaatatggttacatatattattcgaagaacgttatcttcgattcctattcttttgggaattacaattttgtctttcattattatgaaagccgctccaggggacccgatgacacttatgatggatcctacgatcagccaggcagacagggctcagtttattgaaaagtacggtctcaatgaccctgagtatgttcaatatttaaaatggctgggcaatatggttcaaggcgatttcggcacatccatcatcagaaaagggacgcctgtttcagaactgattttagcacggctgcccaacacactcctcttgatgctggtgtcaacaattttggcgctgatcatttccatcccattcggggtaatttctgcaaaaaaaccttattcgaagctggactacggcattacatttacttcatttatcggtttggcaatcccgaatttttggttcggtttgattttaatcatggtgtttgccgtgaatctcggctggtttccaaccgggggagtcgccacccttaactcagatttcagtatagtagaccggattcatcatttgcttttacccgcttttgtgctggcgacagctgatatggcaggcttaacgagatatacaagatccaatatgcttgatgttttaaatcaagattatatccggactgctagatcaaaaggtttcaaagagaatcgagtattatttaagcacggcttgcggaatgcactattgcctgttattacgattttcggcttaatgattccttcctttattggcggagcggttgtcgtagagcagattttcacttggccgggattaggaaagctgtttgtcgattcagcattccagcgcgattatccggttatcatggcaatgactgtgatctcggcggttcttgtcgttgtcggaaacctcattgcagacatcctttacgcgattgttgatccgcggatcgaatattaaaaggagggaaacagagatgtcagagctgcaaacaactccctcgccggagatcaggctgaaagaaaatatttcgaaaaagccagaaacaatgacaaagattttctgggaaaaattctcgaaaaacaaactggccattttaggtgccgttattctttttatcattattatgtctgctgttttcgcccctttaattgcaccttatccccaagagcagcaaagcctgcttgataaatataaggcgccgggccttgaacatctgatgggaacggataaatttggacgtgatattttcagccggatcctatatggagcgcgtgtctctttattggttggatttgcgtccgtagtcggttcgattttgatcggaacggttttaggagcattagccggatatttcagaggaatagtggatgctgtcattatgcgtgtagttgacattgtgttatccattcctgatattttcttgttgatcacgctggtcaccatcttcaagccgggtgtggacaaactgattttaattttctgtctcacaggatggaccacaacagcacgattagtaaggggagaattcttgtcgctccgttcaagggaatatgttcttgctgctaaaacaattggaacaaaaacgcacaaaattattttttctcatatcctgcccaatgcgttagggccgattatcgtgtcagctacgctgaaagtagggtctgttattctagctgaatcggcgctaagctacttgggctttggaatccagccgccaatcgctagctgggggaacatgcttcaagacgcacagaatttcacagtaatgattcaagcatggtggtacccgttatttcccgggctatttattttaatgaccgttttatgcttcaactttgtcggtgatggcctgcgggatgcgcttgacccgaaaaatattaaataaaaatgaatatcatatctgttataaaatatcaccaaatcagaaaaaaagcaggtctccttttgtcagaaaatatacaaagagatctgctttttatgattcttacataaacccactgattccagatttcctcaatctctttggaataatttctctatcccttgcctatactgtggacaacagtttttataaaagtgaggggttagagatgttatttcttcatgatgtgtgggtcaattggtttgaaggggaagaaaatggctacaatgtatgccactttcacgaatggcgcaaggaagatacggttgagcttttggatcaggtgccgctgttaagggtgccgtcagtactgtttcattacatagaaaacgatttgtcagagcttccgaaaggtttgcttgaagacgtacatcagaaatcgtacattcggaaaaatcatgagcggacaaagcttgagtattgttttgtcgtaacagacggaatcggcattttagctgtcgacacgatcggctacacgatccctgtcagaaaaagccgtctgatcccaagacaggagcagctcgtttatgaaatggtaaaagatgtagagcctgaaacatatgaatttgagccaaagaagctggaatcctccaaggaatatcacatcttatcattagcaccagaacatgtcagaggactgacaagaaaagaacggcaaatcaagcagctgatgtttatggcgcttgaccaattaaaagggctgaaaaaccgggcggaaattggttactggtacacagagtggaatccgcatatgtatgaacaaatcaaaaggatgagctttgaagagatttgggacatgctgtataacgaaacaattgaaggctggtcggacaagcacctagctttttgcgaaaacctaataaaaggacagccttttttcgaaaagctttgggaaatggaaaacgaatcaaaggtcaactgaaaaaaaccgctctttgcaaagagcggttttttgattagcgtctttttcttccaagacccatggcattctccatttttttcagcattttgtttgctgtccggttcgcccgttccgcgccttcatcaagaatccggtctaattcttcagattctatcagctcataatagcggtcctggatcggttttaatgcgttcaccacgacttctgccaaatcacctttaaactcgccgtagccttttccttcgtactttgcttcaagctcttcaattgtcgtattgccgaggattgaataaattgtaagaaggttggaaacgcccggtttgttttccttatcaaatttgacaatgccttcagaatccgttacagcgcttttgattttcttttcaagctgcttcggctcatccagcagggtaatataagctttctggttcggatcagatttgctcatcttcttcagcggatcattcagagacatgatgcgtgcaccgacttttggaattttcacttccggaatcgtgaagatgtcgttgtattttttgttgaagcgttctgcgagattccgcgtcagctcaaggtgctgcttttgatcctcaccgacaggcacgagatccgttccgtacagcagaatatcagcggccattagcggcggatatgttaacaggccggagacgacagcttcattgcctttggatttgtccttaaattgagtcatccgctcaagctcgccgatatatgcgacacactgcatcatccatccggcctgcgcatgcgcggggacctctgactgaataaacaatgttgctttttctggatcaagtccgacagctaagtaaagcgctgcgagattgcggatattctttctaagctcaagccggtcttgaggaacagttatcgcatgctggtccacgatgcaaaaatagctgttataatcatgctgcagttcgacaaactgcttcattgcaccgatatagttgccgagcgtcactgagccgcttggctgaatgcctgaaaaaatcgtttgtttcatgaaaacatcaacctcatttcttaaaacataataaaaaaggctcattcttcccctgtaaaaaagggacgaatgaaccgtggtaccaccctgattattccattaaaatgaaatcactctgacgtttgtaacggagactgctccggctgagcctacttttttccagttcggtcagctgctccaaagtccattccacattgcccgttatctgctcccagcaccgcagactctcttcaaacaggtgaaatgtgtactactctttttcatagcaagcttttcttttgattgcttcattataaatcaattataaccaattgtcatcatgaaaaaacattcttttttccagtaaaattgtaataatataaataacacgagtgttgtaaaatccttaaatgataactgctatcagcgtaaaaacaggcagatattatatgtaaaaagcaatatgggcagaagacacatgaaaaagtttttaatcaatttatgctttaaatggtagaaggatattatgttcatggaagaaaaactaacgaagtttaaatattttaaattgataaaataatattgcaataaattatttgtttcattataatgaacttgttcactctattgttacagcttttttacaaaaataatcagaaaagacggaacagaataaaagtttgtgaaaactcaggttcatttgtctgatatttctgaggatttagccgtaaggagctgaaaattattattagggggtttgcgaatatgaaaaaacgttggtcgattgtcacgttgatgctcattttcactctcgtgctgagcgcgtgcggctttggcggcagcggatcaaacggtgaagggaaaaaggacagtaaaggaaagacgacacttaacattaatattaaaactgagccgttctccttacatccgggattggcaaatgattcagtttcaggcggtgtcatccgtcagacttttgaaggattgacacgcatcaatgcagatggggagcctgaagaaggcatggcatccaaaatcgaaacaagcaaggacggtaaaacatatacattcactattcgtgatggtgtgaaatggtctaatggagaccctgtaacagcacaagattttgaatatgcttggaaatgggcgcttgaccctaataatgaatcacaatacgcttaccagctctactacataaaaggtgctgaagcggcgaataccggaaaaggcagcctagacgatgtggcagtaaaagctgtgaatgacaaaacgctgaaggttgaattaaataacccgacgccatatttcactgaattaactgcgttctatacgtatatgccgatcaataagaaaattgcagagaaaaataaaaagtggaatacaaatgccggagatgattatgtatcaaacgggccgttcaaaatgacggcatggaaacacagcggttctattactctcgaaaaaaatgaccagtattgggataaagacaaagtcaaactgaagaaaatcgatatggttatgatcaacaataacaatacggaactaaaaaaattccaagctggcgaacttgattgggccggtttgccgctcgggcagcttccgacagaatctctcccttccttgaaaaaagacggttctttacatgttgagccgatggcaggtgtgtattggtacaaattcaacactgaagctaagccgttagacaacgtcaatatccgtaaagcattatcttatgcgattgaccgtcaatcgattgttaaaaacattacgcaaggtgaacaaatcccggctatggctgcggtgccgccgacaatgaagggatttgaggataacaaagaaggctactacaaagacaacgatgttaaaacggcaaaagaataccttgaaaaaggcctaaaagaaatgggcttaagcaaggcatctgaccttccgaaaatcaaattgtcttataacactgatgatgcacatgcgaaaatcgctcaagctgtacaagaaatgtggaagaaaaatttaggcgttgatgttgagcttgataactcagaatggaatgtctatattgataagctccacagccaagattatcaaatcggccgtatgggctggcttggggacttcaatgatcctatcaacttcctagaattgttccgtgacaaagacggaggaaataacgatacaggctgggaaaacccagaattcaaaaaattgctgaatcagtcacaaactgaaacagatcaaaacaaacgtgcagagctgctgaaaaaagcggaaggtattttcattgatgaaatgccggtagctccaatttatttttatacgattccttgggtacaagacgaaaatctgaaaggaactattattactggaactggagaaatttacttcagaaacgcgtactttcaataagtcttatttgtgaaaacaataacctcaaggtatatggggacctatttcccatatacctttcttactgaggaatataaaaaagtaaaaaccatggaggtgttcccccttgctaaaatatatcggaagacgcttagtctatatgattatcacactatttgtgattgtaactgtgacattcttcttaatgcaagcagcaccgggcgggccattttcaggtgagaaaaagcttccgcctgaaattgaagcaaacttaaatacgcactatggcttggacaagccgctgtttgtacaatatgtcagttatttgaaatcagttgcaatgtgggatttcggaccgtcatttaaatataaaggtcagagtgttaacgacctgatcagttcaggtttccccgtttcatttactcttggagcagaagctattctcctcgctttagcattaggtgtattgtttggagtcattgcagctctttaccataataagtggcaggattataccgtcgcgattttaacgatatttggtatttcggttccgagctttatcatggcggctgttctgcaatatgtgttctccatgaagcttgggctgtttccggtcgcggggtgggattcctgggcatacacctttttgccttcaatcgcacttgcttccatgccgatggcgtttattgccagactttcccgttcaagcatgatcgaagtgttaaacagtgattatatccgcacagcgaaagcgaaagggctgtcccgcccagcggttacagtgcggcacgccattcgaaacgcgcttttgccggttgttacatatatgggcccgatggccgcacaggtcttaacggggagcttcattattgaaaccatttttggtatccccgggcttggtgcacacttcgtcaacagtattacaaaccgtgattatacggtcattatgggtgtaacggtgttcttcagtgtcatcctgctattgtgtgtattaattgtagatgtgttatacggcattattgatccaagaatcaagctttccaaagcaaagaaaggagcctaggccatgcagaacattccaaaaaacatgtttgaaccagccgcagcgaatgccggcgatgcagaaaaaataagtaaaaagagcctttccctctggaaagatgcgatgcttcgcttccgcagcaataagcttgcaatggtcgggcttatcattatcgtacttattatccttatggcaatttttgcgccgatgttctcaaggtatgattattcaactactaatctcttaaatgcggataagccgccttcaaaagatcactggttcggaacagatgatcttggacgggacattttcgtccgtacatgggtaggggcgcgtatctcaatctttatcggtgttgcagctgctgttctcgatttgctgatcggcgttatttgggggagcatttcaggcttccgcggaggcagaacggacgaaatcatgatgcgtatcgctgatatcctttgggcagttccttcattattaatggttatcttactgatggttgttcttccgaaaggtctatttacgattattattgccatgacgattacaggctggattaatatggccagaatcgtgcgcggacaagtgctgcagctgaagaatcaggagtatgtgcttgcttcacagacactgggtgcaaaaacatcccgtcttctgtttaaacatatcgtgccaaacgcaatgggttctattttggtcacgatgacactgacagttcctactgcaattttcacagaagcctttttaagttatttgggacttggtgttccggctccgctggcgagctggggaacgatggcttctgacggattgcctgcattgacctattatccgtggcgtttattcttccctgccggatttatctgcattacaatgtttggtttcaacgttgtcggcgacggattaagagacgcattggatcctaagttacgtaaataagggagtgatacgggtgacacgcctattagaagtaaaagatttagcaatttcatttaaaacatatggcggagaggtccaggcgatccgcggagtgaatttccatctggataaaggggagacgctggccattgttggagaatcaggttccggaaaaagtgtaacctctcaagcgattatgaagctgattccaatgcctccgggttatttcaaacgcggtgagatcctgtttgaaggaaaggatctggtgccgctgtccgaaaaagaaatgcaaaatgtccgaggaaaagagatcggcatgatatttcaggatccgatgacctccttaaatccaacgatgaaggtcggtaaacaaattacggaagtgctttttaaacacgaaaagatctcgaaggaagcggctaaaaaacgcgcggttgaactgctggaattagtcggtatcccaatgccggaaaagcgggtgaaccaatttccgcatgaattttcaggcgggatgagacagagggttgtcattgccatggcgcttgcagcgaatccgaaacttctgatcgccgatgagccgacaactgctcttgatgtaacgattcaagcgcaaattttggaattaatgaaggatttgcaaaagaaaattgacacgtccatcatctttatcacacacgatcttggtgttgtggctaacgttgctgaccgggtcgctgtcatgtacgcgggacagattgtagaaaccggtacggtagacgaaatcttctacgatccgagacatccgtacacttgggggcttcttgcatccatgccgacactggaaagttcaggagaggaagagctgactgcaattccgggcacgccgcctgatttgacaaacccgccaaaaggagatgcttttgccctgcggagctcttacgcgatgaaaatcgattttgaacaggagccgccaatgtttaaggtatccgatactcattatgtaaaatcgtggctgcttcatcctgacgcgccaaaggtagagccgcctgaagcggtaaaagcgaaaatgcgtaaactggcaaatacgtatgaaaaacctgtcttagtgagagaaggtgaatgaattgactgaaaaattattagaaatcaaacatttaaaacagcactttgtcacaccaaggggaacggtcaaggctgtagatgatttatcatttgatatctataaaggtgaaacattagggctggttggtgaatcaggctgcggtaaatcgacaacaggccgaagcattatccggctgtacgaagcaaccgatggtgaggtgctgttcaacggcgaaaatgtgcacgggagaaaatcgcggaaaaagctgctggaattcaaccgcaaaatgcagatgattttccaagacccatatgcatccctgaatccgagaatgacagttgctgatattattgctgaaggccttgatattcataagctggcgaaaacgaaaaaagagcggatgcagagggtccatgaactattggaaacagttggtttaaacaaggaacacgcgaaccgttatccgcatgaattttccggcggccagcgccaaagaatcgggattgccagagctcttgctgttgatccggaattcattatcgcggatgagccgatttccgctttggatgtatccattcaagcgcaggtcgtgaatttaatgaaagaactgcaaaaagaaaaagggctcacatatctgtttattgcccacgatttatcgatggtcaaatacatcagtgaccgcattggcgtcatgtatttcgggaaactggttgagcttgcgccggcagatgagctttatgaaaatccgcttcacccatatacaaaatcattgctttctgctattcctcttcctgatccggactatgagagaaatcgcgttcgccagaaatatgatccgtctgtccatcaattaaaggatggggaaacgatggaattccgtgaagtcaaaccgggacattttgtgatgtgcacggaagccgaatttaaagctttttcatgattcatcaatccttcaagagatttctcttgaagggtttttttgcgtcctcatagaaagtgagaatgataacatttacaattagaggaaaaaagcggaggcgaaatacgattcaatttctgcataacaaaaatgtttttgcgctattgctgtctcaatcttttcaatctttagcaggtgtcctcgtcacaatcgttttaatggtccgggtctatcaaatgactgactccgtttttttggcgggccttattttatcgttcatgtcgtttgcgagtatagcagcaagcttttgcgtctctccggtgcttcgcattctcggttttaaaaaggtgcttgcgggagcgaatctgctgagagcggtctttacaatcctgatggcatacagcgtcactcatcacggacaggcattcttttggattacgctgctgtttgtgttttgtttttccttcgcgggcgctttttttcagccggcaagatttgcgctgctgccgattattgttccaaagaagcaatatgtaaaagcgaatggtgtgatctccctctcgaatcaattgttcttaacagcaggctggggccttggaggccttctgacgtacgccgttccttttgaactcgttgtcggcgctgccatttgcctgtttgttctatcgggagcttccatcagtgtgttgcatgtaaatgaagaagaggctgcaggaactgctgaaacagcatctgtcagaagtatatggaaggatttaatgatcatccctattgtaagagacattactgtaatggacatgttagaagctttggcgggttccgtatggtcatctgctattctcctcgcatttactgcggctgttttgcatgaaacagaggtgtggtgggggatgtttaacgcttcctattttataggcgcaattgtcggcagtgtgattgctattcgtttttcttctttttttgagcggaatatgggctatgccattatgttcagctcgcttgtaatgtcggcgctgacccttttgttttcattttctccagtcccatttttatgcgctctggcttgtgctgcaatggggcctttttatcaggtgcgtgatatttgccaggaaaccatgctgcaggaggttattcccgagcagaaacgaatcggaatcatggctgcaaaaaatgcgattttgactccttggtcaggcgtcacctactccattatggggctagtggctgatgctgctggtgcgaaaatagcttttatcgcggctgctgcattatatatcatgacatttctgattgcactggcgcagccccgcctgattcattacaggcgggaaaaccgagttcaatgagatacacttcaaaatgaacggagcagctggctccgtttttgctgaaaaaaaatgaaaccatggcggaagttcgcacgtctttatagatgtaaggctgtttaaacaagaagaaatggggtatatctaaaagtatgaagacaacgaactcataaggagcaaatcaatgaactggtatgaaaagcttagcgagtactttccaattgaagaaatgaaatcaaaagcgcatatggaagctcttctgaaagagcgaagcgatatttatcataaagatgaaggcaaacatcatattttaatgtttgcggagttcgattcttttatcttcgttgattatctgtatgtgtctaaggatgcaagagggcaggggcttggcggcaaattgatcgcgaagctgaaaaagaaaaataagcccatattgctcgaggtggaacctgtggatgaagatgatactgatacagaaaaacgcctgaggttttatcaaagagagcatttcaagcatgctcagtcaattgggtaccggcgccggtcattggctacgaatgaagtaaacaagatggagattctgtactggtcaccaaaaacagaatcagaagaagaaattcttgaagccatgaaacagacatatgaaaacattcatacttataaagacgagaaatggtacggagaatcgtacgaaaaaacggatgaagtcctgaaactcattgatgaagaaaaacaaaaaaatattttcgatcagttaagctaattgagaattagaacatatcatgaacattaaaaatttgctggattgacacatttttttcttaggatactgttcacacttacttttttatagtataatacctgtaaagattccttttttagagtaatttcaatttaagaataaaatagatgttcatcctactaattagaggagtgaagatgaatggttacactatacacatcaccaagctgtacttcatgcagaaaggcgagagcgtggctcgaggagcacgatattccatttgtagaaagaaacattttctctgaacctttatcaattgatgaaataaaacaaattcttcgaatgactgaggatggaacagatgaaatcatctcaacccgttcaaaagtattccaaaaactgaatgtgaacgttgaatctatgccgctgcaagatttgtaccgcttgatcaacgagcatccagggttgcttcgccgtccgatcatcattgacgaaaaacgtttgcaggtcggatataacgaagacgaaatcagacgtttcctgccaagaaaagttcgctctttccaattaagagaagcacagcgtttggcaaactaatagatcgtatcatcaaaagaaggctgagtcatcagccttcttttatttttcaacctgctggtaataaatgctcgcaagaatgacaaacgcaaccgtcaaaatggggaggagcgtttcaactgtgccgtgctgcgccataaaaagagacagctttttgtctctgacaatcatttctccgccagtataagcaagcagcccgcttcccgcgtaaatcagaagcggtattttctctagtgcaatatggatgagtttgctgccccaaataataaccggaaccgatacacacaaacctataacaacgagagaaaactcaccgtgtgatgctcccgcaactgcgatgacgttgtccagcgacataaagagatctgcaagcacaatcgttcgtatcgctctccacagggaggtgctgcttttaatgtgcttcgtgtcttttttttcaatcagcagctgatatcctaaatacagcaggaaaattccgccggcgcactgcaagaacggaatgttcaaaagatatacagctgcacttgttaatccgattctcatggcaacggcaataaatgttccgagaataatggcttgctgtctttgcttgtccggcaaatgtctgctggccatggcaataacaaccgcgttgtctccgccgaggatcaggtcaatcccaacaatgacaagcagagaaatcagatagtcatgctccatgaagcggcacctcgctttcagtccttcgcttgtactactactatatgagacaggttgtattttatgatatcagccgcctgaactgccgttttttaggaaaaggtgcatttttatttcttttgtgactgttttatcataaaatagaaatacaaaggaattcacactggccttggttaaggttaagatgtggacggaatgggtaaagtgtagtaaagtacaattaatcgggagcttagatgtcccttcaacatcttatatagaagggaaggttggcaaatggaaattgaaagaattaacgagcatacagtaaaattttatatgtcttacggagatattgaagatcgcggttttgacagagaagaaatttggtataaccgtgagcgcagtgaagaacttttctgggaagtcatggatgaagttcatgaagaagaggaattcgctgtggaaggcccactttggattcaagttcaggcactggacaaaggattagaaatcatcgtcacaaaagcccagctttccaaagacggacaaaagctcgaactgccgattcctgaggataaaaagcaagaaccagcatctgaggatcttgacgccttgctggatgatttccagaaagaagagcaagccgtcaatcaggaagagaaggagcaaaagcttcaatttgtcttgcgatttggcgattttgaggatgttatttctctatctaatttgaacgttaacggaagcaaaacgactttatattcgtttgagaaccgatattatttatatgtagatttttgcaatatgactgatgaagaggttgaaaatcagctaagcatcctgctggagtacgcaaatgaatcctcaatcagcatacaccgtcttgaagagtacggcaagctgattatttcagagcatgctctagaaacgataaaaaaacactttgcatcatagcaaaccgatttccttccggaaatcggttttttttatgcacgaaaatgccattttagagatgtgaaaaatcaaaaacatatagacaagcggaaaatacagcgaacaggagttgatcatcttttccagaaagtatacttcatctggaaaggagagatgacaattgtttagtgctgtgactgaagacggccaaatgtttcaccttctaggcgctcagcaaaaccagaaattaaagcggagacggttcttctgtccggtatgcgggggagagctagctgtgaagctcggacttcaaaaagcgccgcattttgcccataaacagaacaagtcctgctccatagatatcgaaccggaaagcgcctaccacttagaaggaaaaagacagttgtatgtatggctgaaaacgcaacgggcttcaccaatattggagccgtatataaagacaatcaaccaaagaccagacgtcatggcaaggatcaaggagcatatgcttgctgttgaatatcaatgcgccactatcgctccagatgtctttcaaaagcggacagagggcttcaaacaagaaggaatcatcccgcagtggattatgggatacagccgcttaaaacggactgcttcgtccttttatcagctttcagcttttcattggcagtttatcaatgcaagtccatacagagaactgatatgttattgtcctgaaaggcgttcttttctccgactcagccacatcattccattctacacaaaccattcttattcctcagtccaaacgatccctatccatcgggcaggtgcagacgatctttttttcactgaaccgaaaccctcaattcaatattcaggctggacgaaagcgattcaccgttttcgccataaaccccatcggtttaactctaaggaaacaaatcgccttaggcagatgttttatgagaagcggcagacatctttttcttttctgccgactgaagtgtttgttcctgttagaaaaggggcagtttttaagagtccggtttttgtgtggcaggggtttctttatttgtttatgacggatcttggagataaacgtgcgccaattcgtttttcagctgttttgcagcagtgcaaactgcacattcataaaaagaacattgcactcaggttcgaatgcagcgaagagtgtctttcagaagcggttaaacagtatattgattttttgtgcaagaagggatttttaagggagactcagaaagaagtatatgtgctgaatcggcctgcaggcggcatacattcaatgcaggatctcatagaaagagaccgcagctgttttatagaatgagtttgtctgatttggctcaccctaagacaaaggtggtgggcaggctgtgaaaggcacaaaaggaaaggtttttcgtgtttttactgcttttttggcattcgttctcttcattactgcatatgatttgacaaaaggcagtgaaaaaccggaagatattcacaacacaagtttattgagaaacagctgttttttcaattggcttgaatcaaagaagacgagggggatcaccatggctgaggaaaaaaaagcaaaccaactgcctgacagaagtgaggtaaaggcagaagacacatggagacttgaggatatttttcctagtgatgaggcctggaataaagaatttcaagctgtaaaagaattaattccgaatttatctaagtataaaggaaagctggcagattcagctgatcatttatacgaggctcttacgtatcaagataaagtgatggagcggctgggtaggctgtacacatatgcgcatatgcgctctgaccaggatactgggaactccttttaccaggggctgaatgacaaggcgggaaacctgtatacacaggccgcaagcgcgacagcttatttggttccggagattttatccatagaagaagacaaactgcagcagttcattcttgaaaaagaagaattgaagctgtactctcatgcgattgaggagattacaaaggaacgtccgcatgtgctgagcgagaaggaagaggcactgcttgctgaagcctccgaggtactggggtcatcttcaaatacattcagcgtgttaaataacgcagatataacgtttccgtccattaaagacgaagatgggaatgaaaaacagatcactcacggcaactttattaatttcttggaaagtgaaaaccgtgaagttcgcaaaaatgcgtttgacgcagtgtataaaacgtacggacaatataaaaacacaatggccacgacgctaagcggcactgtgaaaaaggacaacttctacgcgagagtgaaaaagtacaagtcagcgcgtgaggctgcgctttctaacaacagtattcctgaggaagtatacgataaccttgttaagacgattaataagcatttgccgctcctgcaccgctatattgcgctaagaaagaaagtgcttgagcttgatgaagtgcatatctatgacctgtatacaccgcttgtgaaagatgcggggatgaaggtgacatacgaggaagccaaagattacatgctgaaaggcctcgcacctttaggggaagaatatgcctctatcctaaaagaaggactggaaaaccgctgggtggacgtttacgaaaataaaggcaaacgcaatggggcttattcatcaggagcttacggcacgaatccgtatattttgatgaactggcataataacgtcaataatctctttacgctcgtgcacgagtttggacattccgtacacagctactatacgagaaagcaccagccttatccatatggcaattacagtatctttgtcgcggaagttgcctctacgacaaatgaagcgctccttggcgaatatttgctgaacaatttagaggatgaaaaacagcgcttatatattctcaaccatatgcttgagggcttcaggggaacggtcttcagacaaacgatgttcgctgaatttgaacatctgatccatacaaaggcgcaagaaggcgagccgcttacacctgagcttctgacaaatgtctattacgacctgaataaaaagtattttggagacggcatggtgattgataaggaaatcggccttgaatggtcgcgtattccgcacttctattacaattactatgtgtatcagtatgcgacagggtacagcgctgcccaagcattaagcagccagattttgaaggaaggaaagccggcggttgaccgttatattgacttcctgaaagcgggaagttcacaatacccgattgatgtcttgaaaaaagcgggtgttgatatgacgtctccagagccaatcgaagccgcgtgcaaaatgtttgaagaaaaacttgatgaaatggaagagctgctgatgaaagtcaagcagtcttaaaaagtaagcctgtgcggaaatgacgcacaggcttttttaaaaccctttaaaggttttccggtgattcaagcggtagagggtaaacaaaatagacagaaacagcagaggagaggtaatataaagcggcagcatatgcatcatgcctaagatattcagacagaaaaaaacggcaatgcacacaattgagatcaaagtagacatcatggcgatcctcctcgtcctttttccttataaggatatgagtgaatgcacttcgttatgttttgtgacaaaaatatgaacattaagcatagaggttgtcaaaagtcgacatcttttgttatcataaggatgtgaaattgatcacaaacaaacattacccctttgtttgaccgtgaaaaatttctcccatcccctttgttgtcgttaagacatatgaaaccgcgcttatcccggcgcggtttctttagtgctaaaaacagaacgtacgtttggttatggcgtaaaaaaacagcctcaagcatatgcacgcctgcggctatttttcacatgattgatattcatcagaataagtgctgagagacttccaaaacattccgtgtttggcttccactttggcaacctttttagcaaacgccagttttttcatttctttttctacctcttcaaggctcaggtcatatacaagagcaatttccttcgaggcaacgaagcggaaatattcaataaaacattctaaaggcggtgtttccgacggcttcggctcgtcgccaagcatctcaaataaaatttcttcatatacatcatatgagtagctgccaggaactttaagcccttcatcctcatgctgcgtattaaaaaacgtcagtgtcggattaacagaaacatccatctcagcagcaattttcatgtcacattgaagcgccttgaccgcgctttgagaatgcagatcttttttgaattcttcaagatcgagacttgtattttcagcaatctccaaaagcacgttttcatccgtaatatttttctttgaaacaaataggctctcctgcatatttctgagaaattgcatgccggcttttcgtccttgcaattcggctgctttaaaagcgagagcagccatataaggcgatgaaagcggctgatcctgttcgaaccagacattgccgtcacatgacatgccagagcggctcgcgatcttttcccatgcttctgcgagaagatgcttttttcgctttttatttaaagcggtaaggcttgcggaagcgataatgcgtaaggtgaaaaaacgtccgtatctgattttcagctttttgatgacgggctctaaggaccagcattcaggacataaagggtctacaaacatataaatttcaagcggtttttttggatgaccgtggcaatgggcgaagtatagctcatgctgatagtttgtcaagatgatcgatcctccgcttccgtttgattcaccatatgccttgctgtcaactccagccggccaaacaaaaactcacgaatttcgccctccagccctacatggtacattgcgtccttcatacagctgagccacgcatcagctctctcgtttgtaattggaaagggaagatgccttgctctgagcataggatggccgtgctcctcagtataaagcggaggcccgcctaaatactgagttaagaattgcttctgtttcctggcggtttctgtcaaatcgcttggaaaaatcggcttcagcaaaggatgagacgcgacacgctcataaaaagtatcaacaagttgcgatagaagttcctctccaatcgcttcataaggtgcgttaaacgattgtcccatgttgactactcctttaaatatggctaataggaatcataaatcctattgcaaaaagtaattttctgtatttcattgtttcatctagatttattttagcaacaaggcatcatttctacaaacaaactgccttttatgcgtttgatgacttatttcggctgacagccggggtttgtatttcatatcatatcacataaaaatcaggaatgcgtaagatttcacttcgcaaaaaaaccagagggaaagagcacctctggttacgcgtaataagctgaagttattttttttacatagttttgcgtttcttggaaaggaggaatgcctccgtatcggtcaacattccccggtccggcgttgtaagccgctaatgccatagacacattgccgtcgtatttatccagcatttgttttaaatatttcgttccgccctccacattttgctgcggatcaagcggattggaaacgccaagtgagcttgctgttgacggcatcagctgcatgaggcccatcgcacctactccgctgaccgcttttgcattaaagcctgattcctgtttgatgacggcgcggatcagtttttcatcaacgccatatttatcagcggcttttttaatcgcactgtcaatagaaaagtctcccgaactgatctgatttgctccatgtttgtttgaagctgaatctgcagcagctgtttcagtgctttctgccgcttttgtgattgaacctgaattgctgctcgtatatgagttaagcccatacgctgaaagcagtgacggcgctgttgtattcccgctgttcagcatgttgagcgggcttggcgatgaagaaggtgctgattgctgagatgccagaccgtttgtatattggctgagcaaagagctaaaacttgaaagcgggctttccgtattctgagtgtccgagctgctgcgtgcattagatatggactgtagtgcctgaagctgaagtaaagctgcccaattcgttacattcacgatgtcattccaccttatatagactttcgtttttcttcataaaaacgcagaattttatttttggtttcgcgctgaggaatgctgaattgctgaagcagcttctcgaaagcttttctgccctcatgccaatccgccgcctcaaattcaatttcatagtcctctttatttaaatatcggctgtggtctaaaactattaagcctttttctgtttctttttccgcacggtttgttgctaaagatccaaagtattgaatggcatccgtatcgatctgaagcttgtgcagctggtccttcacagggccctcgggaactgaaaatccagcgagatctgatacctctgaaagctgctggtgcgtttccagaagccccacatcagccggctcctttaatgtaaggacatactttccgttttttctgcggatacgaagcgcagcttgtttttgtttcagcgcgaagctgtctgtatcaaaataatgattcttttgatctgtaaaatctttttctgtcagctggagtgccgctgctatgtttttgaattcttgtttggtcagcatgtttttaaattcgatttcaatttcttggctcatgatgctcttcctttcctccctgtaaatcttatttttactattatctctttagatgttaggtttatcaatatcgagctcgatatgataaaatgaatctgtactttgtttaaaaaaggagagcattatgcaaaacagaatcgaaattttgaatgcaacattatcggatgatcagcttcgccttgcctgtcagacagaaggaaacgaagcggaacgcaagccgtcaggtcaaatgcttgttgattctgaccactttgcttttgtatacatacttgaattagctgattcttttgaatatgtcattataaaggaacatgtatggccggaactgaagcaggcccatgcacaaaaaataccggttgttttagaggcaggagaccaaacaattgaactggcaggcctgcatgaggagctggaatatcttttagaaaatataaaagataatgcaaactatggagaagaaatggaagaaaaagtgaaacgcgtgtttttatagaaactggttcggaattgggggatgtatgatggatgacaaacaatgggagcgttttttagtgccgtaccgccaggctgtcgaagagttgaaagtgaagctcaaggggatccgcacactatatgaatacgaggacgaccattcaccgatcgaatttgtgaccggacgcgtcaagcctgtggcgagcatacttgaaaaagcgagacggaaaagcataccgctgcatgaaattgaaaccatgcaggacattgctggccttagaatcatgtgccaatttgtcgatgacatccaaatcgtaaaagagatgctttttgccagaaaagatttcaccgttgtggatcagagggattatattgcggaacataaagagagcggataccgatcataccatcttgttgtgctgtaccctttgcagacggtatccggagaaaagcatgttctcgtagaaatacagatccgtacactggcgatgaatttttgggcgaccattgagcattcattgaattataaatacagcggaaacattcctgaaaaagtaaaactaaggcttcagcgcgcttctgaagcggcttcccggcttgatgaagagatgtcggagatcaggggtgaagtacaggaagctcaagctgccttttcaagaaagaaaaaaggaagcgagcaacaataggtaaaggggaagaagagcatgaaatttgccgtatcatcaaaaggagatcaagtttctgatacgctgaaaagcaaaatacaggcgtatttattggattttgatatggaactggatgaaaatgaaccggaaatcgttatttcagtcggaggcgacggaacgcttttgtatgcttttcacagatacagcgaccgcttggacaaaacagcatttgtcggcgttcacacaggtcatctgggtttttatgccgactgggttcctcatgaaattgaaaaacttgttcttgccatcgcgaaaacgccgtatcatacagtcgaatatccgcttctcgaagtcattgtgacctatcacgaaaacgagcgggaagaaagatacttagctttgaatgaatgtacgattaaaagcatcgaaggaagccttgttgctgatgtggaaatcaaagggcagctctttgaaaccttccgaggcgacggcctctgcctgtcaactccatcaggcagcacagcctacaataaggcgctgggcggagcgattatccatccgtctatcagggcgatccagcttgcggaaatggcttctattaataaccgcgtgttccgtacggtcgggtcacctctgcttctcccatcccatcatgattgcatgattaagccgagaaacgaagttgactttcaagtgacgattgaccatttaacccttctccataaggatgtaaagtcgatccgctgccaagttgcatccgaaaaagtgcggtttgcgagattccgtccgtttccattttggaaaagagtccaggattcgtttattggaaaaggtgaatagaaagaggacatatcgtggagcatttttttatcagaaagaacattacttccgctgaggacgggatgactgtaaaagaatatgccagtgaactgggaatttcgaaacgtctgctgaccgatattaagtttggcgggggagacctgcagattaacggtgagcatgtgacggtcaaatacgttttgaaagatggagatcttcttatcgtgaagtttcctgaggagcaggtgagcgagacgctgttggcagagcctgttccgctcgatatcctttatgaggatgaacatgtgcttgtgataaacaagcagccgtatgtgtcatcaatcccttcgagagagcacccctccggcagcattgccaatggaattattgatcattatcaaacaaccggagtgagggcgacagttcatcttgtcacccggttagaccgggatacatcaggtgtcatgcttgttgccaagcatcgatttgcccactccattttatcgtctgcgcaaaaaaacggccttgtgaaacgccggtatgcggcagtggttcacgggcggatggcacagatggagggaacagtcgatgctccgattggcagacatcctgacagtattattgaacggacggtaacgccagacggccagaaggctgttactcatttttacgtcacatgtgcaaatgacgacatgacctcggtggcattgcagcttgagactggacgaacccatcaaattcgtgttcatatgagttatctcgggcacccgttgtgcggcgatacactgtacggcggaacgagacaggaaattgaccggcaggctctgcacagcgagcatctttcgtttatccatccgctgacacaggagaacatgacgtttcatgctccactgcctcaggatatgagaaaactgataaaaggagagaatcattgattctctccttttttatatggggcgaaatcttgattcgtcgtaaggcagggagcttggaacagagacggtttctatttctggaaagcgaaagcctgtcagttgatttccgaacacgcagcctgtatcaatgttgatggtgcgattgaccttccgaggctctttcacaggtgtatgaccgtataccacccaagcctttccgttataggctgccgcccaatcacgtctgacgggtctgccgtccggatatgtttcacccgtcacgtcaccgtaaagcacaaagtccttcactctgcgggtatatttgccgatatcgtcagctcttatgccagcatgggcgacaactaattctccattatgtaagatgtcgtaaagcggcgctgtttcgtacagcttcataaactgttcgctgactgattttttctcatctttggaaagttcctcaagctctgccgctgttgtttcgagaccatgcatcacttttaccggatttccttttaagtaacgatataatttattgcaatggtttcccgggacataacgcacagcgcctttttcgtaagcgccggctacaaatcggatgacctctatcgatttgggccctctgtcagttaaatctccggcaaaaacaagcaccctgccttcttcatggacaggtactccatttttgattgtatagccaagcttttggattaatgcagtcatttcgtcatagcagccatgaatatcgctgatgatatcgtaagccatgcggtctcctccttaccgattgttttatttattatgaagcaaagtgttgtgagtcatcacaagcttttatgtgcaaattatagaagaagaatcattttctaaacaggattaagaccttatcactttatttttcatcatcacccttgttaaaatcgcgttatgttttttaaaaatgaggttttgttctctgagtgagaactagcataaccctgacttaaaaaggaggttctgattatggcgcatacatctgtcgcatctttagttgttgtacttatcgttgcatttttgacacccatccttttgcatcggtttaaactcagcatcccggttgttgttgctgaaatcattatggggctgataattgggaaaagcggccttaatttagttgtggagggtgacacctggctccagacactctctatgctcggatttatctttttaatgtttttaagcgggcttgaaattgatttttcgtcgtttgagaaaggaaagaaaaagcagttcctgccgaatggcaaggaagcgccgaatacgtttgctgcggcatctgttattttcgtcggtatttttattttatcattgctcttgtcctatgggttcgtcttggccggatttatccaaaatgcatttttgatgaccctgattatttcaacgatttcattaggcgttgtcgttccaacattaaaagaagaacggatcatgaattcgaatatcgggcagattattttgcttgttgctgttattgctgatttggccacgatgattcttcttgctgttttttcttctttatacggagaggacagcggaaacatgtggctcctgatgattctgtttgcggccggagtggtgctttactttttcggccgggtcttcaaacatcgctcttttgttcaatccatgtcaaaagggacgatccagatcgggacgcgtgccatttttacgttaatcattgtactcgttgccctgtctgaatcacttggggcggaaaatattctcggcgctttcttagcgggggttcttgtttccctgctttcgccaaacaaagaacttgttcagcagctggattcattcggttatgggttcttaataccgattttcttcgtgatggtcggtgtgaagcttgatatttggactcttttccaggataaaacaattttaatcatgattccgctcctgctgctggcgctgttagtcagcaaaatcattcctgtcatgtacttaaagaagtggtatgataaccgaaccattttcgcgtctggtttcctgctgacatcaacgctttcgctcgtgattgccgctgcaacaatcggccagcagcttcacgtgatcagtgcaaatatgtcaggagcgctaattttagtagccgtcattgcaagtatttttacgccgatctgttttaaaaaattatacaaacgggaagagcagccggaggagaaaaagacgattacgttcattggcgccaatcaaatgactttgcctgtcacactcgaattgccagaggaagagtatgacgtgcgtgttgtacacgtctaccaagagaatgcggaggaaaagctgtcagaatcagtgtttgctgttgaaacaatttctgactatgaacacgagacgcttgaatcactcggcatttttgaaacggatatcctcgttgtggcgacaggaaatgaagatatgaatgcagacattgcattacttgcaaaagaaaaaggcacagaaagagtcattgcaagcgtaggatcaccggagcatgaagcagctctgaaggagcagggaatcagcatcttttctattctgctgtcgacaaaaacgctgcttcgcgcactgattgaagcgcctggcgtcatgaagctgctcacgaaccaagagtcttcgctgtatcaaattaatatggagaacagtaaatatgatggtgtcattttacgggaattccctttaacaggtgacgtcatctttgtcaggatcttcagaggtgtggacagcatcgttcctcatggggatacaaggctgaaacttggagaccgtttaattgtcaccggatctcgggggtacgtaacggatcttaagaaaacattggaaggataaatcttgaccaaataaggattcgtgttaatatagaggtgcagaacaattcaatatgtattcgtttaaccactaggggtgtccttcataagggctgagataaaagtgtgacttttagaccctcataacttgaacaggttcagacctgcgtagggaagtggagcggtatttgtgttattttactatgccaattccaaaccacttttccttgcgggaaagtggtttttttattttcagagggggaatgatttgtgaagttttcagaagaatgccgcagtgcagccgcagaatggtgggaggggagctttgtccatccgttcgttcaaggaatcggtgacggaactcttccgattgaccgttttaaatactacgtacttcaggattcctattatttaacgcattttgcaaaggtgcagtcatttggcgccgcttatgcgaaggatctttatacaacggggcggatggcaagtcatgcccaaggtacatatgaggcggaaatggcgcttcatcgcgagtttgccgagctgttggaaatcagcgaggaagagcgtaaggcgtttaagccgtctcctacggcgtactcttatacatcccatatgtaccgttcggttttgagcgggaatttcgcagaaatcttagcggccttgctgccatgctattggctctattacgaggttggtgagaaattgctgcattgtgatccggggcatccaatttatcagaagtggattggcacatatggcggtgattggtttagacaacaggtcgaggagcaaatcaaccgctttgatgagctggcggaaaacagcacggaggaagtgcgtgccaagatgaaagagaattttgtcatctccagctactatgaatatcaattttggggaatggcctatcgaaaagaaggctggtctgacagcggcataaaagaggtggaggaatgtggagcttcacgccataacggatgacagcaagccggtagaagagctagcgagaatcatcattacgattcagaatgaagttgattttattcatattcgggaacgttcaaaatcggcggcagatattttgaaactgctcgagcttatttttgaaggcggtatagataaacgaaaactggtgatgaacgggcgcgtggatattgcgcttttctctactattcaccgcgtgcagctgccaagcggcagcttttcaccgaagcaggtcagggccagatttccacaccttcatatcgggaggtcggtgcattcactggaggaagcggttcaagcagaaaaggaagacgcggactacgtgctgttcggccatgtgtttgaaacggattgcaaaaagggtcttgaaggcagaggagtatctttgctgtcagatatcaaacagcggatttccatcccggttatagccatcggggggatgacgccggacaggttaagcgacgtaaaacaagcaggggcagacggcatcgctgttatgtcaggaattttctcttccgctgagcccttggaagcagccagacgatattcccgcaagctaaaggagatgcgctatgaaaaggcattatgaagcagtggtgattggaggcggaattatcggttccgcgattgcttattatttggcaaaggaaaacaaaagcaccgcattgtttgaaagcggaacaatgggcggcagaacgacaagtgccgctgccggaatgctgggcgcccatgccgaatgcgaggaacgtgacgcgttttttgatttcgccatgcacagccagcgtctgtacaaaggtcttggagaagagctttatgcattatccggtgtggatatcaggcagcataacggcggtatgtttaagcttgcattttctgaagaagatgtgctgcagctgagacagatggacgatttggactctgtcagctggtattcaaaagaagaggtgttagaaaaagagccgtatgcgtctggtgacatctttggtgcatcttttattcaggatgatgtgcatgtggagccttattttgtttgcaaggcatatgtgaaagcagcaaaaatgcttggggcggagatttttgagcatacgcccgtcctgcatgtcgaacgtgacggtgaagccctgttcatcaagacccctagcgaagacgtatgggctaatcatgttgtcgttgccagcggggtgtggagcgggatgttttttaaacagctcggactgaacaatgcttttctccctgtaaaaggggagtgcctgtccgtttggaatgatgatatcccgctgacaaaaacgctttaccatgatcactgctatatcgtaccgagaaaaagcggcaaactggttgtcggcgcgacaatgaagccgggggactggagtgaaacaccggatcttggcggattggaatcggttatgaaaaaagcaaaaacgatgctgccggctatacagaatatgaaggtggatcgtttttgggcgggactccggccgggaacaaaggatggaaaaccgtacatcggcagacatcctgaggacagccgtattttatttgcggcgggccatttcagaaacgggatcctgcttgctcccgcaacgggcgctttgatcagtgatctcatcatgaataaagaggtcaaccaagactggctgcacgcattccgaattgatcgcaaggaggcggttcagatatgatgctacagctgaacggtaaagacgtgaagtgggaaaaagacacaggtacaattcaagacctgctggcgtcttatcagcttgaaaataaaattgttatcgtggaaagaaataaagaaataatcgggaaagaacgctatcacgaggttgagctttgtgatcgtgatgtcattgaaattgtccattttgtaggaggcggatgagcatgttaacaattggcggaaaatcatttcaatcaagattgctgctgggcacggggaaatacccatcgtttgacattcaaaaggaagcagtagctgtttccgagtctgatattttaacctttgctgtgcggagaatgaacatctttgaagcatctcagccgaattttctggaacagcttgatttatccaaatatacgcttttgccgaatacagcgggcgccagcagtgctgaagaagcggttcggattgcaaggctggcaaaagcgtcaggcctttgtgacatgattaaagttgaagtcatcggatgcagccgttccttgctgcctgaccctgttgagacattaaaagcgtctgaacagcttcttgaagaaggctttattgtgctcccgtacacgtcggatgacgttgtgctggcgagaaagctggaagagctcggcgttcatgccatcatgccgggtgcatctccgattggatcgggacaaggaatcttaaatcctttgaatctgtcatttattattgaacaggcgaaagtgccggtcatcgtggatgcgggaatcggctcgcctaaagatgcggcatacgcaatggagcttggagcggatggcgtactgctcaatacggctgtatcgggcgctgacgatcctgtgaaaatggctcgtgccatgaagctcgcggtggaagcaggacgcctttcttatgaggcgggccgaatcccgcttaagcaatacggaacggcaagcagtccgggagaaggtcttcctgtatgacaggcaggtattcaaggcaggagctgtttgctccgatcggcccatccggccagaaaaaattgaaagaagcgcgcgccgtgattatcggcgccggcgcgctcggaacagccagtgcagaaatgctggtgagagcgggagtcggctctgtgaaaattgccgacagagattatgttgaatggagcaacctccagcgccagcagctttatacagaagatgatgtcaaaaaagaaatgccgaaagcagccgctgcggagcgccgtctccgttcgattaacagcgatgttgatgtgaccggccttgtcatggatgtgacagcagaaaatatcttcgagctgattagggatgcatcaattatagtggatgcggctgataattttgaaacccgcctgatcgtaaatgatgctgcggtaaaggaagggattccttttctttacggtgcctgtgtagggagctacggcctcacctttaccgtggtgccgggttctactccttgcctgcattgcttactcgatgcacttccgattggcggagcaacatgtgacacagccggcatcatcagtccggctgttttgcaggtagcagtctttcaggtaacagatgcactgaagctgctgacgggagaggagtgcgagccggtgctgcgctcctttgatttgtggaaaaatgagcggtcagaagtgagagcggccagtctcaaacatgacgcatgcccaagctgcggcacaaaggattttccgtttttgtcatatgaaaatcaaacaaaagcggctgtattgtgcggcaggaacacggtgcagatcagatcatctattacgaaagaagcggatcttgaagcgcttgccggtcagctgaggcaggccgggcttgaagtagctgcgaacccgtatttaatttcctgccgctcggatgatatgaaaatggtgctgttccgggacggcagagctttgatccatggaacaaatgatattgcccgggcaaaatccatttatcataaatggatcgggtaataaaaggagtgtagtgtaatgagtatatataaagcattgacaatcgccggatcagattcaggcggcggcgcagggatacaggctgatattaaaacctttcaagagcttgaggtattcggaatgtctgcgattacagcggtaaccgctcaaaatacgcttggcgttcatggggtgcatccgctgactgtagaggcgttgagacagcaaattgacgctgttgctgaggatttgagaccggatgcagtcaaaacgggaatgctctggaatgccgacatgattgaagaagtggcaagaaaaattgacgagtacggattcaatcgtgtaattgttgatccggttatgatcgcaaagggcggggcatccttgctgcgtgatgagtcagttgccaccttaaaggagttgctcattccaagaagctacgcgattacgccgaatgtcccggaagcagaaacgctgacaggaatgacaatcagctcgctggatgaccggaaaaaagcagcggagcagctcgtcaagatgggtgcgcagcatgtcattatcaaaggcgggcaccagcctgaggacaatcacattactgaccttctttttgatggcagcatgtttatgcaaatcacccatccttatatcaatacgaagcatacgcatggcacaggctgcacctttgctgcagctttaacggcccaaacggctaaaggagacagcatccatcaggcatttgaagttgcggccaactttgtccgtgaagcggtggaaaatacgctcggcatcggatcgggacacgggccgacaaaccatttcgcttttaaacgaaacagcttaaatacaagccgatgagatcaccagctgatggtgatctcttttgcgtttgctacggtatgcgcttttcatctggacaaggttatgatatgataggaattaagatcaggtactaatactatgtctttattaaatataggaggctttatacatatgaatttttcacttgaaggccgcaacattgttgtgatgggggtagccaataaacgcagcatcgcctggggcattgcgcgttctttacatgaagcgggtgcacgtttgattttcacatacgctggtgaacgcctggagaaatccgttcacgagcttgctggaacattagaccgcaacgattccatcatcctcccttgcgatgttacaaacgacgcagaaatcgaaacttgcttcgcaagcattaaggagcaggtcggtgtaatccacggtatcgcgcattgtatcgcgtttgccaacaaggaagagcttgtcggcgaatacttaaacacaaatcgtgacggcttccttttggctcataacatcagctcatattctctgactgctgttgtcaaagcggcacgtccgatgatgactgaaggcggaagcattgtcactttgacgtaccttggcggagagcttgtgatgccaaactacaacgttatgggtgtagcaaaagcttctcttgatgcaagtgtgaaatatttagctgctgacttaggaaaagaaaatatccgcgtcaacagcatttctgccggcccgatcagaacattatctgctaaaggcatcagcgatttcaactctatcttaaaagacatcgaagagcgtgcaccgcttcgccgcacgacaacacctgaagaagtgggcgatacagctgcgttcttgttcagcgatatgtcccgcgggattacaggtgaaaatcttcacgttgattcaggtttccatatcactgcccgctaagcaggatctatttcaagcaatcccgaatagggattgcttttttatttcttctgattttcagctttctgtcatatagatagaatatgacacaatcggagggatgaagatgtctaataagaaaagaaacgcggataaaaaaccgctcatgtatattgttcagccggattatgcagaaactacaagatcatccatgcaggagattgtcatcaaaagaaaggccgacaaacccgctccgccaaaagctgaggaaaagccggtttaccatgagaagcagcaggaggaagctgtggcacaggatgtcctgcaagaagaccaaaagcctgcagccgaaccagtgagtcagcaaactcaagaggtgagagaaccagagaacataaaaagccaagaggaacagaaagcagagccgcaggccgtagaagaaaccgttgaacacgagcccccgaaagcagaaaaaaaggaagagcctgcacttgaggcccggaagcctgagaaagaaccggaagctgtccatagtgctgataaagcggaggaaaaagcaccgccggcacgaaaagtgaaaaaaccgatgagcaagatgacgatccacgaaaaaattgattttttaacaaagctgcctcataacatgccgagagcgctttgtttgattgaagccaatggaagaacgtacaggggcgtgattgtcggaagaagaaatgattccgtcctgcttcgaacaaccggaaacggagccccaaccgaactggcaatcgatgatattacctctttgcacccgctcggtttttaacgaaaaagaaaaaagctgcccggctgatgttgccggacagcttttttacatagagaaaagcctgcggcttgcaagcttttccagcttatgattaatgctgatgatgtgtacgattgattaatcgaggatttaagcagttgattgcgcagaagcagtctaagtcaacttcaatacagtagttcgttttttcgagtcggaacacttcacacaccgtatctttatcggtgaagtccaaaatgtgtttgtgttcgtcaaatgcgattaataatgacagtgttgcgcagcttccatgcactctttcgaccctgaaaaatactgtattaaagcaagggccgttatcgagttcgccgacatttccgaaggcgactaatggcgttgattttgatgtaaatattgcaaaaggcactgtgtcgcctaacgaatggcttacagataaaagcttagagtggcagccggtcgggcagtcttcttcaacagcgttttgcagatcttcaatattttctacagcttcacgcacgcagcttgatgttttctggctcatattatccctcctgccttataaatttgagactggcgaaatgatggagagtcagctgcctcacgcaggaagcagctgaatgatttgcacctgtaatagagtttggaaggggattcctctttacaagtgtttatccattgtgatgatgctttttatctttatgaggcgatgttctgtcaactagctctggtgacaggcactgaatcgcgcagaagcatccgagatccacttcaatgcagaaatctgttttttctagcccgaagaaatccgggtcgcaaggatggcaaacacttaaggtatcgcctttaacatcgacagggcgtaaaatagacagtgttgcgcagcaatcacataatttttcaacgcggaagaaaatggattcaaagcattgcatatcatccacaaatccccccacgtttccgaatgtggagaacaatccgccttttttatcaaacaagagaaacggaattgtgtctttacctgcaattgtcggattcaaaaggtttgtatagcagccagtcggacactgttcctcaactgcctcctgctctgctaaaatcttttccactgcatcgcatacacagttctcatgccggccatgggtttttccgcagctcattgatttcagctccttctttatagggtatttgactttagtccttaacaacatatgtacccgtgccccacttggtgtgggtgaacgtctatatattcatcatatgcttggaaaataagaaaaagcagagcgtttttagctctgcttttaggttctagaggacaagagtgatgactaggacagcgatcagaacgtttgtagctgtagagacaagggttgcgatatcggcatctactgttgtgacgtttacgccgcgggagcattcgataagaagtttctggcggtttacttgcttgttagctgtaagctgcaataaatcttgtgcgactaattcagcaataacgccatctgcaatggaggtgagagctactgtcaagacagctgcattaagcgctgttacaatagatgttacggcttgaacgtctgtagatgaaacgttgatgtcacaagagtctctaataataatcgtctcatctgagacttgtttgttgagatttgcctgagctagatcttggtcgataaaggcgttgttgtcattgccaaacccattgttattgcagcaaatatcgcaattgcattttctttcttctttttctttctctttgtgctctaacggatggtcacagtcaggatcaagtgcaacccaagagtatggtctgctttccatatctattcctccttttcttttactgttattaaatgagcgagcctcttactttgactgaggcatttatcttgatgatgtgccctattttttatgattaatttgaattgttattgttttgccgtctttgtctgagctgttcaatgagctgctctctgcggctaagcggtttatcgctcttttgctcttgtacggcttcttcttcttttttcttcttgtgtttttcagctagctccgctgatttcgcttgcaggtcttttaccatattcaaaagcatttctttttcttcatctgatacttttttcattttgtcttttgtgatgccgtgttttacaaatatgttttggaccagcattttcatcattggatcaacttctgggagcttttcaagctcttctttgattttatcgttatctgacatttgttctcacctcaacttttagtttgtgaaaagaaagggttaaaggatgtcgaattcaagtagcatactgtttaacacctgaagcaagatttgtacaaaggttattatttcgtctgcagacaaagtaatcttgatgtttcggctgttgataattttaatgatggttctttttttgatttgagagttatcgagaatgagtatttcgcttgctactgtgtcggccaagtcctcgtcggcaataacgagctgtgtcagcaggataatcaatgttgtaaccaaggcttgtatagaaagggcagatgttatatgtgacgtatctattgtgatattttcgcaatcaatcacttcgatctgctgctcgaattcgcttgataattgctcaaatatgtcaggatgcagggattcaatttttgtttcaaatgacataaccttcactcctttcttatccatactctatataatgcaaatggggtgcagagcggaataataaaaataaccaattttctgccggacaagatacaattcatgaagaatagggttttcgcatatatgtgaagggatcatgattggcaaaggagtgaacgagtggttataaatgggctgacaattgttcttctatcgcttgcggtctttcggctcgcccgcctgctggtgtttgacacgattatggcgccgcttcgcagtctgtttcatgaagagaaggaagaaaaggatgcggacgggaatattcaaacctatatcgtgattaaaggaaccggtgtcagggcgtttattggtgaattgctgagctgctattggtgcacaggcgtgtggtgcgccggctttttgattttatgccaggcgttgatcccgcaagcggcgcagtggctgattttacttttggcgatcgccggccttgccggcatcatagaaacgctcgtatcaaaatggctgcaagaatgaggcgttaccaccagcaacttttcactagcatcagcataaagtagcatatatgacataaggaaaggaagggaacaaaatgaatcaattcaataaaccttcccaaaaatctccatatacagattcgtcgtatcaatcaaaaaagataaaaaagaaaggctgcgggtgcggaaataaaaagaaaaagcctcaatagcctggcaaagaaaccggagaactccggttttttgttttttaacggagcggcctcgctcagcatatatcataagcggggggataaaagtgaatgagtttgaaaaatggatagaaggaagatatgaaccacacgaacaaaagcaaaaagagtatgaagacacgatgggccgtatcagaaaagacttggatgcatttgataaagccggtctggaatttgaagatgagattgaagagctggctgaaaaaacggaggccttacttaaaaaacatcaagctcaatatgatcaatcgtaaatccgcaaacgccctatgcgaatatccaagccgatccaatcagctcacatagtgtatagagagtaaaggaggtgcttatctatgggctttggatacggattcggcggcggctacggcggcggctgttatggcggttatgctggcggttacggcggcggctatggttcaacatttgttttgttggtcgtattattcattctcctcatcatcgtaggtgcatctttcttttaagatgtattgaggaagtacgggttataacccgtgcttccttgccttgtgtttatttttaaaaatgttggaaaagcacattgtattatgtgcattcatacaataccgtattactccgccaaaaggaggcgcattatggataatcaattttttaagaacatcgaaaagaaaacaggtgtgaagatgcaggatgtaatgaatcttgccggatcactccaaaacgctaattttaaagatgaaaatacagtgcgcagtgtgattaaccgcgtagctcagatggcaaacagacgcgtgccaaaagaattagaagataaaattgtggaatctattacaagcggaaaagaaaagcttgattttggcacgatttctaaaatgatggataataaataagtggatggcctggctgactcactgcagcgggcctttttttacagtaaaaacccggcagtaatctgccggactgttaatgatgcaagggctgtcttgctttttgtagaaggggatacaaaaatcttgagcggttggctgttttgccgcgcctgttagcggggcaagacaaatataaatgctgtttcgcccgggtcatggctacatataaaagacgtctttcctcctcaagagcggcctcgtctccttttcttgccgtttctaatgagaaatcgtgcggaatcgagccgtctacagtgcctaacacgtagactgttttgaattcaaggccttttgaccggtgaatggtcatcagctgaacgccatgttcatccgttctgtttttctcagcggccctcatatggtctacgtgggcaagaaagtcaggaatcgttttgaacttcttggcgacaaccttgatgtcgcgcaggtcatcggaacctttttccagcttgttgccctcattgccccgcttttttaaatactcggagaagcccatttttccttctgcaaaggtgatggcttctacgggcttcatcgtgcggaggcttgcaaaaaacggtacgattttcttgattttgtccagctggaatggcttcagatcaggcaatttggccagcgctttgatcatggtacagtcctctgtaatcgagagcgccttcagcgtattcaaagcggactgttttaaaaacaaggcgggaagcaagtgtttaatcgcctcggtgtcatcctcattttggctggcatacaagtaggcgagaatctggcggacgatccgtctgctgtaaaacgattggacgccgcggtcagctgtatacggaattgatgattgatgaagcctttcataaatagcacggcctccgctgtttgtgcggtacagaaccgcaaagtcttctggactggctccattttgaattttttctttgatatcggaaacgaccattgtggcttcttcctcttcatcataaggataaaacagcacagggacctgaatgtcatcgcgggccgcttcaagcgttttggcatatctgtttttgttctttttcacaacgatatcagcactagagacgatcgggtgcgtagacctgtagttcgcagttaaatagatcgtcttcgctcccggataatccttttgaaaatcaagaatgaaagacggattgcttccgcgaaacgcgtagatggactggtcatcgtctccgacacagcacaggttttgctccggactggcgagcatttgcatgattttgtattgaaccggattaatgtcctgaaactcatcaattaagatatacgtaaaccgagattgatattgttccagaaggtcaggccgctcgataaacaattcatagcaggctgaagccatgtcatcaaaatcaaattggctgtgttcttttttctggcgttcataatgttcatataaacgataaacttgtttttcccactcatcttttagagggatgcgttcatttgggacataagtgtttttccaaaaaccgatctgctgcagagcttggtcaactgggaattctttctcatcgatgccttcttcatagagtgcttttttgatatattgttcccgctgccactccattttcagcagatgctcaccgttccatttagcagaattagagtgatacaagatcttataaaacagactgtggaatgttcctgtcacaagtcttctgacttttgccggctgtaatccgtactggttggccatacgctctttcatttcagcgacagcttttgttgtaaaggtgacaagcagcatattttcaggcggtatgcctaagtgttcgatcatgtgggcggcacgggctgtcagcacccgtgtttttccgctccccgcacctgcaagcacgagcagcgggccctctgtttccgtgacagctttcagctgatccgtgtttaaaccgacagacggaaaaaggctcgtatcgggttctattgtttttggcacaaatggtgttcctggtttaatgcttctaggacggtgccattccgtaacagctggggacgggtcagcggcgatcgcttttcccttgggtaaacgaatgacaccagattcctgatcgtcttcttttttttcctctttagagggcttcggttcgcacgcctcctcacatgccggaaaatcgcctggctggcgatggataaactctggcggatcggcgatgttaagccgtaacaaaacgggctttccgcaatgagaacaaaataaatgtccttttattccctcttcaaagaggaattgataatgttctctcgaatatgtatgtaaatgtatgattctatcattcagtcgggcgcatttcaaaaaggggtcctcccaatcaaaaggtgttcattacagacaatgactatcatatcaaaagaaatgtgtttcaaaaagtaagtttaagggaaaagagacagcagaggggtgggtattgtatgatatatgcaggtcaaattcagaaccagcaatacgctcaatatgctaatagaacgattggacataagcaggattatgccggaaccgaaaaaatcagctatgtcccgtttcagcgggtatacaaagaactggaaaagcagcaggagaatcaaacggcagctgaaagaaaagtaaacgagatgaaacgtaagcgctctctttataagagattgcgagaaaaaggaatgggcacatatattaatcgatatgtataaaaaaccgttcataccagagaacggtttttttatatgcagtaaaaatccggatctcaaaagatccggatgcgttcagtccttcatcatttgtaagtgcggaatgccggcatcgaggaattctttttcagaaagcacgcgatacccgtgtttcttgtaaaacggcacagcctgtgtttgcgcgtttaaaatgaaaccggaagcgcctccgtctgccgcggctttttcgagcgctttcataatgatgccgccgacaccggctgagcggtggcttttcagtacgcaaatccgctctaacttgccgtagccgtccttcatgcgccatcttccggcaccgacaggcttttcaccgtcatacacgatgatatgctctgactcattttcaagttcgtcaatttcttcttcagcaggcacgttttgttctttgacaaagacttcttctcttacatagaatgcatctttcagttgttcttcattttttgcgataactgctttcaaacattattctcctctgcctagcaagaaggtttcatatactgtccacgatccgttttccagctggtaaagcaagtggaaacggtcaacgatttcttcatgcgacacttcctgcatttttaattgtcccagcacatctgaatgctcatcgtcggagagattttggccgaccgtcacatgcggaacgaaattatattcctgttctcctgccaacacaccggtgtatagcttttcattgagtgtttttaactcttccgtcggttctgctttgatgtaaatgacattattgacaggcgcaaatgagctgtattttgtcattttgagaacgagtgggtgggactcttttgcgatgtttcttaaatgtgatacgagctgatccgctttctcctccgcgcattcaaaggatgctctcagcgtcaaatgaggcgggattagagagtagcttgggtcatagcgctttctgtaagagtttgcaaggtcttggagcttttttgatggaaataaaacgattccgtatttcatattatgtccctcctggaaataaagtatgatagagtgttaaagcatttttttcagcgccggggtgatgagcggctgccagtatgtccatttgtggtctccgtcaaatggctcgaaatcataatcggaaagctttttctccagcagctgtttcagctcccggttcggttctgtaaagtccagaatgttcccgtctgtcgtgtggacgtcagtttcttttgttccgatttggtgataaatagagaggtgtttgatatcgtctgactgttttacggcttctagtacgtgtttgtcaacatagggagactgcatgatgatgttgccaaacatattcggataatcaagcgctgtcataagtgacacggttgctccgagcgaatcacctatcagcgttcggccgtaaccgatctgataggttggatactcatcatctgcaaaaggaacgagctcatgggcgatgaaccgtttataagccgaaaattttgaaccctccggatgataggtgtttctgcgctcttttacatccttataaggaacaccgataataatgctccggtctatttcgcgtttcgacagcaattcctcaacctgtctgccgattctccccagcctgaaataatcgtggccgtcctgcgcgataatgacatggtatttataaagcggggagtagttggacggcagataaacaagcaaggtcatttcctcgttaagctcttttgaaaagaatttcttttcttgcactgtgccgtttttcggtgccataaaaacattcctccaggacatcactatactttcttgcattttcaattattgtaccatgaattattagaaatttctctctttaaacggttcggcacacgaagaaaaaagtgttgaaataaactgtgaattgcgctaatataaaacaatcagaaaattgaaatcgatatttcttatcgtgagaggtggagggactggcccttagaaacctcagcaaccggcttgttttgcatgtgcaaagcgccaaggtgctaaatccagcaagcgttttttatgcttggaagataagaagaagcgttaaaccccttcttcttatgaagaaggggtttttattttgaaaagggaaggtgtcagctatatgtcacagcacgttgaaacgaaattagcccaaattgggaaccgtagcgatgaagtcacgggaacagtgagtgctcctatctatttatcaacagcataccgccacagagggatcggagaatctaccggatttgattatgtccgcacaaaaaatccgacacgccagcttgttgaggacgccatcgctaacttagaaaacggcgcgagagggcttgcctttagttcgggaatggctgctatccaaacgattatggcgctgtttaaaagcggagatgaactgatcgtttcatcggacctatatggcggcacgtaccgtttatttgaaaatgaatggaaaaaatacggattgacttttcattatgatgatttcagcgatgaggactgtttacgctctaagattacgccgaatacaaaagcggtgtttgtggaaacgccgacaaaccccctcatgcaggaggcggacattgaacatattgcccggatgacaaaggagcacggtcttctgctgatcgtagataatacattttatacaccggtcttgcagcggccgcttgagctgggagctgacattgtcattcacagcgcaaccaagtatttaggcgggcataacgatctgcttgctggacttgtcgtggtgaaggatgagcggctcggagaggaaatgtttcagcatcaaaatgcgatcggcgccgtcctgccgccatttgattcgtggcttctgatgagaggaatgaagacgctgagcctcagaatgcgtcagcatcaggcaaacgcgcaggagcttgcggcgtttttagaagagcaggaagaaatttcggatgtgctgtatcccggaaaaggcggcatgctgtccttccgtctgcaaaaagaagaatgggttaatccgtttttaaaagcactgaagaccatttgttttgcagaaagcctcggcggggtggaaagctttattacataccctgcgacccagacgcacatggatattcctgaagagatccgcatcgcaaacggggtgtgcaatcggttgctgcgcttttctgtcggtattgaacatgcggaagatttaaaagaggatctaaaacaggcattatgtcaggtcaaagagggagctgtttcatttgagtaaacacaattggacgctggaaacccagctcgtgcacaatccatttaaaacagacggcggaaccggggcggtcagtgtaccgattcagcacgcctcgacttttcaccaatcttcatttgaagagttcggggcatatgattacagccgctctggcacgccgacaagaacagctctcgaagaaacaattgccgcattggaaggcggaacaagaggatttgctttcagttcaggcatggctgctatctcaacagcatttttactgctgtcacagggtgatcacgttcttgtgacagaagatgtatacggcggaaccttccgtatggtgacagaggtgctgacccggtttggcattgagcatacgtttgtcgacatgacggatcgtaatgaagtggcgcggagcatcaagccgaacacaaaggtcatttatatggagacgccatcaaatccgacacttgggattacggatattaaagcagttgttcagcttgcaaaagaaaacggctgcctgacctttctggacaatacattcatgacaccggcactgcaacgtccgcttgatctcggcgtggatattgtacttcacagcgcgacaaaattcttaagcggacacagcgatgtactctcaggtttagctgctgtcaaggatgaagagcttgggaagcagctgtataagctgcaaaacgcgttcggcgccgtccttggcgtgcaagattgctggctcgtgctgcgcggcttaaaaacgttgcaggtccgtttagagaaagcgagccaaacagcgcagcggcttgcggaatttttccagaagcatccggcggtgaagcgcgtgtattatccgggactggctgatcatcccggcgctgaaacccataaaagccagtcaacgggagcgggcgccgtactatcttttgagcttgaaagcaaagaggccgttaagaagttagtcgagaatgtgtcacttccagtcttcgctgtcagccttggcgccgtggaatcgattttgtcctatccggcaacgatgtctcacgcggcaatgcctaaggaagagcgtgaaaaacgcggtatcactgatggcctgctccgtctgagtgtgggcgtcgaacatgcagacgatttagaacacgatttcgaacaagcgctgaaagaaattgctccagttgcggttcgttaaaaaagaagccggggatggcccggcttcttttattattgttcgtcatcaggattcagaatcgcgaggacttgatgatcctcccaaacgccattaatttttacattttttcgggcgatgccttctttatgaaatcccgctttttctaaaacacgcatggacccgagattacggggcatcacaccggcttcaatccgatgcagtttcaattcgtggaacgcataatcaacaaccaatctgactgcctctgtcataatgccctttccattatgggctttgtctaaaaaatacccgatgaacgcagtttgcagcgcgccacggatgatttgaaagagcgaaaccgtcccgattaatctatcgtctgacgctgtaaagatgccaaaatgatattcttcatctttctcaagtctttcctgatactcggttattcgttttctttgcccctcaaccgtatagtaatcgtctgcgcgtatcatagaaaactgttcgaaaaaatcccgattttcgctttgcagccgcaaattttcttcggcatccgttacttctaaaggtctaacataaatggtttttccttttaacatacagtgatctctccgttctcatgtcagcattcctcttacattattctcagggaaatgcaaatatcctttttataagaaggaagaaaaccaatttcccataaaagtgccaacatagttgccgattaagtagccgagcgtaccgacaagcatgatcggggcaacaagctcccgccatcccttggcaattgccatcgcagccgcagtcgtcggtcccccgacagtagcgttgacggcgagcagaatttcttcaagctgcacacggaacaattttccggcagctaaggaaaccgctaaattgctgatcgcaatgataaacacgaataatagaataagaggcgcattcgtgacgattaaacggagatctgcaggaatgccgatcaccacaaaaaacaaataaatcaaaaaggttccaagttcctgagatccattgagcctttcaaaaaaacgtgggaaaagaaaaatgataagaacagttaaagacgtaagcaccaggtactgatcaccaagcgtaccggtcagcaggggatgagaaaaaatgcttttaaaataaccagaaaccttcatacttaccgcaacaagtgcgaaagcagcaccggcattaaaagctatatcctttaaggaaatatccttccgtttccaatagctttcagcactgtttccgctgtttccatcggcttttaccttctcttcaaacggcatggcataatgccgctgaaaccatttgagtgcaggaatgctgattaaaataaaaaacaaaagcgccatcataaaattatcagccacaacggtagccgacacatattcaccaggcgtctcaaattttgccgccatcgccgcaaagttgaccccgccgccgatataagaggcgctgatcatcccgccgattttatcgagatagggaatatgctgtttaagtagaaaaaaagcaagaatgctcccaagcacagtgccagcggagctaatcagaaaaataaacagcaaacgcctgctttccttaaaaatttgccgaacattgatctgaaacaataaaagtggtatcgccagcggcaccacataagaccacacagtatcatacacaggcgactcaacaggaagcactcctacatttgtaaacaccatagcacctgccagcgcgataatagcacccgacacagcggacgcccacttaaagcgctgctccagcccgatgctcactgccgcccacaccgcaataaacccccacaatacccatacatcatcagaagaaatcaaagaatgcaaaatcccatcacccctattgttagaaaattaagacatattataatagccggggaacggaacagcaagtccaaaaaaagtttttctaaaaaagcagttgacgaatagaagggaaggttatataatagaacttgtcagaaagacaataacatacccagcaacacatacatatcatgattccgtagctcagctgggagagcgctaccttgacagggtagaggtcgctggttcgagcccagtcggaatcatagcttaaacccttgcgcagcaagggttttttattttgcttatttattgattttgtctcattcatcgaattggggacgaaattatttttttgagctgattttgacgaagaatctcaaaatcaactctgtttttgtgctaggtttctaggatcgaactggttaaagtgttttactgtgctattttcgagtttctcggtaacgtggccataaatatcactagttgttcgagcactggcatgtccagctcttctttggatagcaactgagactttcgccagcttccataaggagagccaccatagtatgccgcaagtcatgaagacgaacatcttttaggccgtacttcttttttaattttagtccattttgcggtaggggttgtatagtagtaaggttttcctttaccactgtgaaatacaaattgatgttctccgccttcccaggcatcgccaagcaacaatttttccacttgttgcctaaaaagacaatcaaacgcttaagtaattatatcttcaatatccaattatctattctatcgcctctttccatattaaaatcaactctaaaaactcatcagtttctataatactttcaaaaggctcatcaacccggtaatgatgttcagctattgtcttgtttttcttaattattatacttgtagcattcaacgtaatttcaaagtcttcataatctcctgttaaaaccttcttaacgtatccaatatactcgtctgcttcctcttttgttgaaatatcctcaaaaacgtccgagaaaatagttaatttttccggtagtattattcttgtgataccaaatggatctttttttaattgatatgtatatctcatcttgtttatcaccttctatgttatttattatacaaaggataagcagtggctattgtaccatccttgtttaagaacatttctattttaattcctgttgaattttcacctataaacttattagcacctatcttttttttattttgatacgcttcatcaatagcctttaacacatctacacgattccattcctttggaaaaaaactagatttggctatttttctcttcccgcttatttcaacattggcttcataaacaccatttttatcaggtgttttctcggaaccaggtataatttttccacccatcatactttcatgatgatatccaactgctttaccgcgtctattaatttcaccatggtaaatgtgtttcatcgttcccgtattatatttacccgtatccttattgttagaacgttcagatcttctgagaacactctcttttttattttcaatcatactttttaggagaggagtattttttgcgttatacgtattctcgatgtcttgtgcaatcccaaccagtgcaagatcattcttatttctaataatagaattgatgtaagatttgcctttgtttattcctttattgacatgagcagcggctgttccaccttcaaccactttacctactttagaaagcttggtagtggtttgcaccgcggcacccgcaccttttggaccaacgatatttccgatcacataactgatataatgacctttttcatatgcatcaccatttaccattttatcattccatgaatcggcgaggtttgtccagatgatttttgaataagaaggtacgctcaaaatggttgtaattgtttttgtcagtttcagttcgatagggagctgtgaatattcccatgcgcccacagctaagtctttgatgccatatatggtatcgtcaatcacatcgtcaataccatcatcaactccctcaacgaaatcaattactgtcttgctggcattgattatacttttaccgacggccttcagctgttttgcttgttcaagctgcactgcgtattggagctgttcaggggtaagattctcatagccgaccttcttggcaatgtctaagtattcatctggatccgtcactccgtcagctagcttctttttcagctctttgatttctcgttctttcgcttcatctttcttgatcttcaaataagcttcagtctgtttctcgatatcgccttttttcttatgtatgtcactttcacggtacgccttggcgttgtagtgaatgggcgtagcgtttttcccttttcctgtggattcctcaagcttttgaaagtccttcttgatgaattgctcgtttggctctgattgggcatattcagtaacaagtgcttcgtccacgctgcctagtttatcgactgtttttttgcgtttgtcctctgcatctgcaagttcgtctttaaagtcttctgtcgagaacaaatcaagtgggaggatgtcatcgatatcatgtaagatatctttcaacgctttcttttgttcagacattatggattttgattttgtgtaggcgttagccagttcgtgttctaagaaggattcttctatatatgcatcagacaagctggcgtcctctaaagtgcctgaaatgcttgttaagaaagcaattttcatatcaagtaagtcaatccaattgtcagctacacctgcgtggtcttgataaaatgctttaatgttgtcggcgcctttgccggaaaactcactgtcatctaaatcagctacagctttaaaggctttctttagattgaccatctgacttcttaattctttgtattcctttgcacgtttatctgcttctgaaagcagtgatttggcttcaaatactttcatgttcatatcctttcgtttgaatagctccaacaagattttaccatgggaaaatgaagaaatagacagcgatgtgattcaaaagtgtgaaatgaataatttgatctgtgtcaatttacctatttggattatttgtttggaaactgatgacgcagtaagacgattccagctgatgaatggtttaaatcctgatggcatttatggtcctaagactaaagctaaactcgaatctcttcttaaataaaaatagccctcctcaattggagggctatttttatttaatagaaacgtgatgtgtgtaccagtttccggttgcagtgaatcgtaattccatatggccgtggcggttacctccatactttacaaacgtgtaatcagaattggcgattgcatccttagccgttttatcaatgtttgcaattttcttggaagtgattttaccattccagccagcaaaacctgaagcggatgcacttggcgggctttcccactttgttattttctttccatactcgtatgaatagttgtcacttactcgaatatcatataattttatccctgtaaactttacagcgtaatagccacttgcagttttattttgggtggcctgtgtttttatcttttccattcccatatctgtacttacgcccatttccacagtgaaaccattaccgagatcaatttcttgatatggatgatctttgctgacatgcatactgtttaaagccttattcacttcttttacagttgggattttctcagatgaaagggttctcaagtttttttgttttgttatctcgtgaaaggtcgccttatcaataatcagatcagaattcttgtccactttttcaacagcatctgcactttgaagactaaacagagatgaaaaactcaaagctagggcaaaaaccacacccacaagtaactttttcattttatccctccttaatgttttcgtccccatcttatcttaatgtataatattggtaaatgagacgaaagtaacaaatgatgctattgattaaagtattaggctttgaaggaacgggaagatcgaaaagtaaatgaatggttttacccatttaaacaaccatatatcaggtgtatattggattgtaggggagggatatcatggtcaagatcatattggcatttgtttatctatttggcttcgttgtgttgagcaattgggctttcgacggaatattttcagagagctatttctcgccaatcggtttcctttggtctatcttatttacatttttcataggggtttataccggcttgcctttaatctacaaaaagtttactcaatcaagccgtttgactttgaaaagtaaaaagccaatttatttcactatcggtacagctgttattctctttgggctttattttctcaaaaacgaaatcgccccctatttgatgctatgtggctattttttaactctggcatcaggtatagccctgaccatcttattacagcccaaaaccaacaactgtaaaacagtataactaacaagaactaatgaaagcccgtctcaaggcgggctctatatcaaaagaaagggaatttttttgtgatatctatttacaatggtcaatagatattgtataattaaggtatagaaaggaggtgctgaagtggacgaggtaagaaactggattcttgctatcgctggtatcgtgaccatcattaaacacatctacgacatatggcagaaggaaagcgaaaagcatagcaagaaaaagaaaaagcgctcccgccgggtaagcaagaagcgctgatacacagtgagcaaaggggagtaaatccccttgctcataccattatatcacgtccacgataatatgaaaaaatattttaagcagtacaacacagcagattttgccgttttgcttatattggttgccgggatcgtcgcaattgatttgaccgatgagggtatgtctggaaagattgcgcatactgtattgatgatagccgttgttattaccttgttaaaaggattcattatgatgtggagagaaagccgacatgaaagaaagcgaaaaaattaagtttatccaggaagaagttttgactgcagcggaagcgggggagttgcttggaatcactcggcagcgattaagcacccttgtgacttcaggaaagctcaaaccggttaaaaaggttgggacagttgcattgtttttgcttggacatgtacaagcccttaaaaaagaattagaagcaggccggaagaagtaccggccgtatgatgagtgaatcccttctcaagatgagaatgattacttgtcctacttttgccacttaataatgagtggtaaattttatcaatttttgatatcctgtaattaatcataattgcgggggttcattatgaatgtatctgaattagttatttttccagatttattaaagttaccaaaaagcgatttggaggacatttgcaccaacgaaggtattgcggaatctggaggggcttttgaactagcgaaaagaatatgggattatgctgatacgtcagaaaaaaaaacaaagaatgtttacaccgtattgtcacaaattttttgctggtaatacgtcaatttcttggtacacttgtgatagccttgaagatttaagtaaatatattattgaaaaagaaaggcacaatccatttgaaacaaaaattccgtatgaagaggcaaagctaaatacgactccaaagttaagaagtgcatctagaataaacgagcattcatattttttaaggtttatatataaagatggtactcgtaggattataggtgaagatatagaggttttaccgacaaataaaacggctacagcttttatagatgaactaaacggaattatagaagttagagctaaaccaaatgatgctgaaaaaatagcagaggtaattgctgggtatgcaaggcagcaactgtctttacacaagcaaaactttattaaacctttcgggggtagtatagaaagtatagcggataccctaggtggtaaactttacgagtccaaagcaagtcctgagttatggatggacaactttggggaagaagaaaatgaagcattgcttgatatttttgaagctttaagtaaatactttgagaacggagatatagataaacttcaagaatgtttagataatgctaaagagattttgggtggggagctacttagtttaccttttgctgtacttgtacttgctggtatggggaatgtaggtttaaaagttgaacaaaaagatttaaggaacactactttatacaaagtatttaaaccctacttacaaacctcgggtggatatattaaatttgaagttgaggaaaatggtgttcagcacgagttttcaatggttgttggagttgaaagccagagcatctattttcgctctaaaaagactacagaaactgtaataaaaaaggtaagagaaaaacttttattgcaaaaattagttgtgtaaatatttgaaagagggtgatcttatgggtataaattggaaacaaaaatcagaaattgacgaagtgattaaagaaatcgcttgttcaagagtaattagattttatccaacatatattagtaagatcactttaattaatttagatactgtttttgaatatttattggagttggtagatgacggatctctaaatatattgtgggaaataagatgtcctgactttgattgtaactctgtaattttgcgaacacataatttatcagaaataatgggtaaagaaatagaatgtgattattgtgaaaatggtctattagtcagaagacaacatgtattccctgtttttgaaataaatgatgactttagagaatttttaaaacaaagtaaaaaaaaacaagtgaattatctacacgctctataagttcaccaattctccaagaaaaagcattaatttctttagaagacattaatttattactagaagaccgaactaaaaaagaattgaatgaaaaatctggagtgaatatatataattttttatacgttgagggtgattatgtggagaagaaacaatctttgggtagcgtaaaaattggcggaaatgtagggaattttgcaatccaaaatgaaaacacaacacaaactaatggtaataatgaagtaagcagagcatttgatgaaatttttgaacgaataaagggaatcgagaacgatgttcaaagggaacaggccatttttaatgctgaaatattaaggaatgcagttgaagagaacgatgtagataaaggaaaaagagtattagaatttttaagaaattcaattgggacaattggatcgttaacgaccattgctaagttctttggtattactatataaataaggcccaaaagggctttttttatattatccactttttctgttgcttcttcaattcacctttcatcaaaaggctttttacagctatacgaatatcctcttcactctttcctgttttccttttcaaatcgtccagagttggattctttccatacaaatgcatattcactatgatctgatatactttccgttcaaaatcagtcatttgatcatctcctagaaggatgataatcgaacgtatgttcccttgtaaataagttggatttggggacagatggggacgaattggggaccaacttgttcatttttagtcaaaacagaagattttttatcagaaatacttgtcagaaaaccccataaaataagatttcgaaataaaacatccgttcgtgtcagaacataatcactaccttgacagggtagaggtcgctggttcgagcccagtcggaatcatagcttaaacccttgcgcagcaagggttttttattttgcgttaataaagccggttcgtcaaattcgtgagttgttggcgaactgttggcgaaattcattgaccgcagtccaaaaactacctccaaacttacttgattagttcaatagtaacaaacggaagatcggatttctgttaaatcttcattgagaatagccagtccaagaccgtcacttcagccatgcatcttttaaatgaaattttgtactgaaaacatcaattgtatttttaaattctgctctagaatcagcccctttataataatcttgataaattgcttggggtgatactgattcgtgatttgtgctatggtttgcaaggcttgtagcaaaagcaggagcaacagaaacgagtaaagcaagggataatgcagaaccagttaaagctgttttcaatttcattttaagcacttccttttttaaaatacaactttattattaaatggaatacaaaaatatccaaggtgttttttgttagtaagttgagttagggggattggatggcacttagaatattgtttctgctgatgggatgttgattctggatatatttccaacacgattacaggccggacatgaaagcgaaccttgctttgatcggggcaatcatttcatttaaagctgcggtttactttaaagatattgatgtattgagagaagaggaaaacaaatgaacggaatttctgagcgttggaacgcgtttaaattacaaaaatcccctgaaccactctagatcaggggattgctttcccaacagcttattaagtagcggaaggcatgatcaacgatttagtatcaatttattaattgcgaatactagaaacataccgttttccgccttccttagaagtaacatattcccgaggaacgttaagtctattggtagaatgataacttacataaagtttcatatttgctcggctcgttacgatagccgtatgatccatccaaccatcagcatagcgaagacctattttattatggtaatcatagtgatatacatctccaagctttacatttgaatatgtatcagaaacagtcttcatttttattccgccagcttttaaaatgtatgatctaaaggctcctgcattaacccaagcatctgtatagggtttccattctttaaagtacggcattcttccagctcttaatgcttgggaaacaaagttagtacaatctttgtctttataatatttatagtttttatttggttttaaggcatatttttctgcatatttcattgcagcgtaaccactatatcctttaacagatgttgcagtcacagttagttgattagagttagcagcattgaagttcatacttactggtttatcttcacttttcacttcttctttatcatcatttttcacttcttgcttataattttttaaaaattcatctaatttaacatccgaagaatattcttcatcattttcatattgtagagttgaagaagaattatttaattgtgttacatttagttgcttagaagaattactcaatggtattacatttagttgattagaagaatttttaacttgagagaaacttagattagaagtatttgttgattgagaactttgtttattagaagttgttttgggaatttcaagtttaatattatcgcccagagatgttgttactttttcaacaccaaaaacaaagtttcgagtaatataagcttcaacaattagcttattgtttttttcagaagtcttaacatcgtctatatcgtatgtaaactcgtggaatttttgtttgtccactttacttaacgcagaatacagtaagactccttcgtcggaatcagtcaatttagactctttaggatgcgctaaaggagtgttgtgttcaaaatcatatttctgttgttctaacatatccttaactttttcgtaaccaatctcgttggtaattgaaacattttctttagtctctttattagtagtggctgcaaaaacttcatttgttgacactaatggtgacaatgatagacataaaactagtgaagaaagtaattcttttttcatacgaaacctccaataaaatctaaatataagtaatatttatcatttacaccaattgaaatatggcataaaatacatgtaataatataacataaaaataaatacataaaaaggtatcggaggaaaaaatgaaaaagaaaactaaaattatactttctctcttgacagcacttattgttatattgatagtacttccagttctatctcctgttgtctttacagcttcttcggaaaaaggagcaatcagacacgaaatttataaaagaggatatccctaccaaagctactttgcagttctccagaaaagagaaggagacaatgaatctgggaatctttattatgtaaattggctagattggaaagatgaaacagggcaaactcctcacttatgctattcgaaaaaagcatcagatggtgaatacgaagtaagttgtggcacagggccgtaaaaataaattttaaaattgaataagtccaagacggaaagcctgcagacactgatcgttttacagagaaatttgtgcttcgatcggtgtccgtttttttttcgcaactaaccatatgtctatcgcgattactagctatgaaaggagtaattagacatgaaacagtccaaaaagaaaccatcatagaagcaacatgagcgcttagatcgtttctggcaacaaatgatgaacactaacatgcaaacactcagacgtggcaaaggcggcgcaccacagaagaatcaaaacgctgtgactcacggctttttctctaaattcctgccagaagaaacgcttgagatcatggaagagattcaggagcgttcgcctgctgatatgatatgggatcagatacagattcagtatgcagctattatccgggcgcaaaagatcatgttcgtttctgataaggaagaaatgatcaaagagctgaaaaagaaaaggtccctcatatctgaggtcagcgaaattgaagatgggcttgtcatttgttttagtacgtggtttcgctacagactttacagtgaaactataccaaacatatttcacaaacttgataaaataacttttaaaccttcctataaaatgaaggttttttatttgatttcaatttttaaatcctttacatacagcgattgattaactcgagcaatcaatgtcgcagttatatttatttttcaagaaaatgttataatgaaaagccataaaatgataggagggggaatttcgatgcattacataacggcatgtttaaaaatcatcagtgataaagaccttaatgagataatgaaggaattcaaaaaacttgaggaagaaacgaacaaagaagagggttgtattacattccatgcttatccgcttgagccatcagaacgtaaaataatgctttgggagatttgggaaaacgaagaagctgtgaaaacccatttcacgaaaaaacacacaatagacgttcaaaaacaagaattaacggaagtagaatggttaatgaaaagcaatgtgaatgattgaaaggctctttaaaaaaaagacattcaatgacttagaatcagccacttgtgattaagtagtaaattgttgtccaactcttatttttttctatttaatattttttgagacgaaaatgttttttaaagctgattttaaaatgtattcaaagtcagctctgtttgatttaatggattatattctttggataacttgttaccatcataatggagatactccgtataaattggaggttaaaataatgagtcattctcaagaaaaaattgcactaattacaggagcaagcagtcaaggggatattggtacggctatttgtcgtaagttagcctcacagggtatacatatcttctttactcactggaattctgatgcggcctggatagaagaatttcaacaagaaattttacgtatgggtgtccgctgtgaggcaatgaaaattgatttatcagatgcacatgctgcattcacaatacatgaaaaaatttcagataaattaggatatccttccatccttattaataatgcagctcattccgcaagtgataattatgtatcgttagatgctaaatcacttgatgagcattatgcggttaatatgagatcgaattttcttctttgtgttgaattcgcccgtcggtttaaaaaatctaatttaatatcaggaagaatcatcaatatgacatcagggcaggatttaggtcctttgcctggagagttagcgtatgcagcaactaaaggagctatttctgcatttactaggtcgttatcacaagaacttgcaccattgggcatcactgttaacgccgtaaacccaggtccaacagattctacatggatgacagatgaaataagaaattttctttcacctaaatttccaatggggcgtattggcacaccagatgatgcagcacgaatgattgcttttcttgcaagtgatgaggctgaatggataactggacaaattattcattcagaaggtggatttattcggggctaagctactgaaacacaatatacaccaatgtatgatgtattcccaaaactaaatctaaacttgaagcgaaaataaggtcccttctctttttagagggggaccttattttattcatgcatgttttgcatccagaaaatctggcggataaagattaataaaccgttacatatacttttccgaatactgcagtacctttaaacaaagtaatcgtggcttttccttttgatttagccgtcactaaaccattttgatcgacttcagcaactttttggttatcagtccaataacgagtagctgaattatttttaacagaataggtttctccaacttttagaggtaaatcatagtcttgaattttgataacatgtgtaggtgaaatagaaatgttctttacctcagtaggtgtggagtttatttcatgagctgaagctaccccgctgaccgacagagctaacgcagaaatcgataaagcagaaacaacagtttttttgaaattcattttgaaacactcctttaaagttttttgtcttgcactataacaattcaataaaagtaattattttccttgtaaataaatgttaataatatgtgaacgatcaatttatttgagctaagaatattgtgtgccctgcacagagtttgtatttatgatggaaaattgctgagagagaatggccatccttaaaatgttaatagcacacatttgatgggtactagtttgttgagcgtgtgggaattttgttacctgcactttatccccgaagataccaaatcatttttcttcatcatgttcttactttcgtactcatacattagaaaatcttcgttctaaataggtgaagaacattggagtatttttatgaatttctgctgaataacgataaaaaatacattacatagcaaactcaaagaatataaaaatcgcttttttccggatgtttcggtaaaaaacgaaacttttgtctctatgattttattttataatgtaaacggtttcttatatagtatacttatactatcaatttgctcaagtagatactgacaggaaggatagaaaaacagatggaatacataaatacaagacaaaaagagattttgtatctgttgttatctgaacctgatgactatttagttgtgcaagatttcgcagatagggtacagtgttctgaaaaaacaatccggaatgatttgaaagtgattgaggattatctcaatgagcattctcatgcacagcttattcgaaaaccagggttgggcgtttatttacatatagaagaacaggaaaggacctggctaagccaacaattacatactgaacatttttcttctaggcagcggagcgatgaagaaagaatgctgcacattgcttatgacttattaatgaatccgaagcctgtttccgcaaaagacattgccgctcggcattttgtcaatcgatcttccattaaaaaggatttatacgcagtagaagagtggctgaagcgttttgatctcacactggtttctaggcagcggcttggattaaaggttgaagggaacgaaagaaataaaagaaaggcattggcaagaatatctgatttgatccacaatacagcgtttaccagccaatttattaaaagtaagtttttacattatgaagtagactttgtgacgaaagaaatcaaatcattgcaaaaaaagcattccctctatttcacagacgaaacgtttgaaagtttgctgctgcatacattgttaatggtccgccgcatcaaaatgaagcagccgatttcattgtccccaaaagaaatggcggcagtaaaaaagaagaaagaatatcaatggacatttgcttgtttacaacggctcgaaccggtttttgcaatccgctttcctgaagaagaagccgtgtacttaacattacatatattgggcggtaaagttcgttatccattgcaaacagaagagaaccttgaaaatgctgtgcttcctaaggttgtagggcatttaatcaatcgtgtttcagagctgaaaatgatggattttcataaggatcaggatttgatcaatggtttgaacattcatctcaatactgtgctacaacggctgagctacgatctttctgtagcaaatcctatgctcaatgacatcaaaaagatgtacccttatttgttccaccttatcattgatgttttggaagatatcaatcaaacttttgatcttcttattcctgaggaagaggcagcatatttgacattgcattttcaggcagcgatcgaacggatgcagggcagcagcgagacacataaaaaggcgattatcgtctgccacatggggattgggatgtcacaattgctgcggacaaaaattgaacggaaatatcaccaaatcgctgtaatggcttgtattgcaaaggccgatttaaaggattatatcaaaaagcatgaggatattgatcttgtcatatccaccattgcgctggagaatataacggttccccatattgttgtgtctccgcttttagagcctggcgaagagaagaaattaagtgcgtttatatgtcagctgggcgaatcacaccgccaaaaacaaaaaacgtttcagatgctgaacaatacgactccttttttggtttttttgcagcaggaggcagagcaccgctacaagttaatcgaacagctggcgacagctttgtttgagaaaggctatgttgataaggactatgcggttcatgcggtgatgagggaaaaaatgtcggcgacaaatattgggtcaggcattgccattcctcatgcaaacgctaaatttattaaacaatcagcaatcgcgattgccacattaaaggagccgcttgaatggggaaatgaaaaagtttcgctcgtttttatgctggctgtcaaacacgaggatcaaaccatgacaaagcagctgtttagcgagctttcatatcttagcgagcagccggccttcgtccagaagctgacgaaagaagccaatgtcatgacatttttatctcatttggattattaaaagcagggattattccttgcttttttttgttatagggaaaaatgcctttattaccggaacctatggtaaaaaaaagcgattttaatgagctgatttcggtatacagttgagacaagatcttataattcacactttaaaggagggttcctatgaaactgttagcgattacatcttgtccgaatggaatcgcccatacatatatggcagcggaaaatctgcaaaaagctgctgacagactgggcgttagcatcaaagttgagacccagggagggattggtgtcgaaaataagctaaccgaagaggaaattcgcgaagcggaagcaatcattattgctgcagaccgttcggtaaacaaagaccggtttataggcaaaaaactgctgtctgtgggggtacaggacggtatccgcaaaccggaagaattgattcaaaaagctcttaacggggatataccggtctatcgttccgctacaaaatcggaatccggtaatcatcaggagaagaaacaaaatccaatttaccgtcatttaatgaacggcgtttcatttatggttcctttcattgttgtcggcggattattgatagcggttgcattaacgcttggaggggagaaaacacctaaaggcttagttattccggatgattccttctggaaaacgattgaacagatcggcagtgcttcattttcatttatgattccgattttagccggctatatcgcctatagcatcgctgataaaccggggcttgtgccaggtatgatcggcggttatattgcggcgactggaagtttttatgacagcgcaagcggcgccggattcctcggggggattattgccgggtttttggccggatacgctgcactttggatcaaaaaattaaaagttccaaaagccatccagccgattatgccgattattattattccggtgtttgcatcactgattgtaggtttagcgtttgtatttttgataggcgcgcctgtagctcaaattttcgcctctttaacagtttggctggcggggatgaaagggtcgagctcgatccttctggcattgattttaggggcgatgatctcatttgatatgggcggtcctgtaaataaggtggcgtttctgtttggatcggcaatgattggagaaggaaattatgaaattatgggaccaattgctgtcgccatttgtatccccccgattggtcttggcattgcgacgtttttaggaaaaagaaaattcgaggcatctcaaagagaaatggggaaagcggcatttacgatgggtctcttcggcattactgaaggagcgattccatttgcggcgcaggaccctctgcgcgttattccaagtattatggcaggctcaatgacaggttctgtgatagccatgattggcaatgtgggagacagagtggcgcacggcggacctatcgttgcagtgcttggcgcagttgatcatgtcttgatgttttttattgctgtgattgcagggtctcttgtcactgctctgttcgtcaatgtactaaaaaaggatattacggcgtctcctgtgctcagtgaaactgcaccgacctccgcgccaagtgaagctgcggcagcaaatgaaataaagcagccaattcaaagccaaaaagctgagatgtcggaatttaaaaaactgacagacattatcagcccggaattaattgaaccaaatttatctggggaaacgagggatgacatcatagatgaattgattcagaaattgtcccgaagaggtgcgctgctttcagagagcgggtttaaacaagccattttgaatcgtgaacaacagggaacaacggcgattggcatgaatatcgcgattccgcacggaaagtctgaggcggtcagggagccgagtgttgcctttgggatcaaacgatcaggcgttgattggaatagcctggatggatcagaagctaaattaatctttatgattgctgtaccgaaagagagcgggggaaaccagcatctcaaaatactgcagatgctatctcgaaagctaatggatgacaattatagggagcggctgctctccgtgcaaacaacagaagaagcatacaagctgctagaagaaatcgaataaagcgggggattttcatgacgactgaaccgttatttttcaagcctgttttcaaagaaagaatttggggcgggaccgctttagctgattttggctataccattccgtcacaacgaacaggggagtgctgggcttttgccgcgcatcaaaatggtcaaagcgttgttcaaaacggaatgtataaggggttcacgctcagcgaattatgggaacatcacagacatttattcggacagcttgaaggggaccgtttccctctgcttacaaaaatattagatgctgaccaggacttatctgttcaggtgcatccgaatgatgaatatgccaacatacatgaaaacggtgagcttggaaaaacagaatgctggtacattattgattgccaaaaagatgccgagattatttatggccacaatgcaacaacaaaggaagaactaactaccatgatagagcgtggagaatgggatgagctcttgcgccgtgtaaaggtaaagccgggggattttttctatgtgccaagcggtactgttcatgcgattggaaaaggaattcttgctttggagacgcagcagaactcagacacaacctacagattatatgattatgaccgaaaagatgcagaaggcaagctgcgcgagcttcatctgaaaaagagcatcgaagtgatagaggtcccgtctattccagaacggcatacagttcaccatgaacaaattgaggatttgcttacaacgacattggttgaatgcgcttacttttcggtggggaaatggaacttatcaggatcagcaagcttaaagcagcaaaaaccattccttcttatcagtgtgattgaaggggagggccgtatgatctctggtgagtatgtctatcctttcaaaaaaggagatcatatgttgctgccttacggtcttggagaatttaaactcgaaggatatgcagaatgtatcgtctcccatctgtaacatagcagggcttgagaaataaatttgcgagtgaagacgcctattctgcagcaatgatctaaataaaataagagtttaatagttggagaagaaatgttacactcttttctgtatatggtaaagaatgaaaaaacacgattcggttggtagtccggatgcatgattgagaatgtcagtaaccttcccctcctcgggatgtccatcattctttaatatcttttatgaggagggaatcgttatgaaattaacgatttactacgatgatcagttttgggtaggcgttgttgaagttgtggacaatggaaagctaagagcctttcggcatctttttggcaaagagccgagggattctgaagtattagagtttgttcataaccaactcctgaatatgttggcccaagctgagcaggaaggagttcgtttacaaggcagacgtcaaaaaaagatcaatccaaaaagattgcagcgccaggtttcaaaagagttgaaaaacgccggagtagcttctaaagctcaagaggcgataaagctagagcttgaagcaagaaagcaaaagaaaaaacaaataatgaaagaacaacgagaacatgtaaaagagcaaaggtatatgctcaaaaagcaaaaagcgaaaaagaagcacagaggtaaataatccaaacaaaagcaggcgcagtgcctgcttttgtaattaaggactctactttgtaacatatatccaatgtttatactccgctgatttatgattcaatataaaccctaacttctccaaggttttttgtgagcctagattatcatgttcgcatcttgcggtgatccgggatactgtttctcggcttaatgcccagtttattagtttttgggcggcttccacacaataacctttgcggcgatgacttttatttgttgcaaaaccgatttcaatcatgccattttcgtctgggtcacctaaaaatccagttcctccaacaatttcatgactgtccttctttacaataatccatgaatcaaatccttttgttccattgtttttgactaaaatctcgcggaaataaggtatcgcttcaaaaaaatcagaatttggccattcaccatttgtttcataacctaagtctttgatagcctgatgatcttgtttagacgcggcgtcaagaaggggaatatcaatcgtttttaatcgtaatcgattcgtttcaaggagaaccatatatctaatcctcttttctttttactgggaataatgataacatataacaattttctctgataccttggcagtagagaaagatggaaaaattgagggggattgaaagagtgacaggggagagtttgcccagaccaaaaacgggtaggaaaatgctgatgttaatgtgtccctacccgtttttctgttcctgaatgcagggtttctgataacatgttgtgctaccttttcgcaatcaaataaagcgatatggctctttgggtttgaacaggattatgaatgataatgacccattggtttcttcgtcttggaaagcttgctaccgcatacaatggagcagtatcgcgcggagtgaacccaccatttatcacgttgatatctcttccttcaagatgacaaactaagtattcacctggattgatgacctgttggttcgtccatgcgtaagaataaaagccgtctccaagatcttcggtggaagatggggggacaaagccatctacagtcaatgtgatttctcttcttcgctgtctttctgaaaaatctggacttctttgagggttatgagtatgtgaaaagtaaggaattaacgcagggccataaaagtaatgatacaaagcaaccactcctttattttccattcatacaaattgtatgtgggagttatttgttcattcctgttttgttccatgtagactaataatgggctataggcgtccaaggaaatcaatttgtcctttcgttgattcaatgctagtaaccttgaaaatgcaggttaggatgatagaatttacttattactgcaagaagttagatatacatcattttgatagtgggtgaaaacaatggcgaaaaaaatggcaaaaacaaatgcggttcgtctgatagaacagcagaacatctcttatgaggtattagggtataaaacagacggccagccggtagatggcatctctgttgcggaaaaaatcggttatcctttgaaatatgtatataaaacgttggttgcagcaacaggaacaaatcattattatgtctttgttgtacccgttgcagaagagttagatgtaaaaaaggcagcaaaggtgacaggggaaaagaaaatagaaatgattgcaatgaaggagctgttagcggtaactggctatcttcgcggcggctgctcgccaattggcatgaaaaaattgttcccgacctatattgatgcatctgcagaaatgcttgattttattattgtcagtgcagggaaaatcggtatgcagctaaagttggcgccacaagatttagccagatcatgtgatgccgcatttgcagaaattgtatagatgcagatataggggaacgaaaaagcttagtcatatcgactaagctttttccgcatccctttcaaatatgatttcaaaataagcagctgccccatacccatctatactgggagcgaaaatctgaacgaatctccagcctcttttcgcataatcatggatgatttgctggtagtcttctttaggccttcttctcatcgtactcagctcaactcttacgaattcatattctttcatcgtttgatccctcctattaaggtatacgtaaaatggagcgagaagttccgaaaagcctcactaaacacagaaacatcttgaagagttaaggggctataaaaacgaatttcaccgggtcagcagtccaaatgaatctcttgcttattgcatttgactgagtatataagtaaaaaaagagcggtcagaacatataagaaggagatgatcattaacgcactcataacagggtagtgtttagcggagtagatgaaaaaatcaagctgtgaaatttgtttggggctgctgacggcatcaattccatttagcagttttgagagtttagcagtatagttccaatcaaatcgatctgaaacaagctcgcttccttgataccaattaacagcagctaaaaacagaaataccataatagaaaatccaagctgaacaactaaaaatattcccttcacttttgtatgacctccaaatctatgaatatgggaaaatcaaacaatatattaccaccgtatgggttattcttgcaatttcactttcatacaactcaaacgcaagtctatttttttgtttgtttttggcttataatacctgatgatggaaaaagagtgcgggtttatagattagagaaacaaatgtatttcttagcattttttatttgtggagagagtatagaagcattcgattagatctgctttttcacagaaacgcttttcatctgtttgcctgagctttacaattctggcaaaaaaacaatgatttctttcaatcaaaacatgcaacgatgcgacatattttatatcttgatgacttatctcattgcctttaagtcattctatcgagaaagtgatggtattttatgaacaaagaaaccctaaaaaacatactcatgattttttcaatatgcgcaaccctccgagaaaccgatggtatgcgcatagctgatagctggattttgagtgagattatacgatttttgatttgcatggctgtgttttttgccatgacatttctattagatgctgtttttccaaacaaaaaagagtcacattaatgtgtggctctttttgcatcatctgatcagaaacatcataaatgaatcgatcatcatgatgaagaacagcaagcaaaaataaataagcgagtagacaaacatatcctttgcccacttcacgtcatcgtctgttttgaatcctttgatgctttttttgatccatatgcctccgagaaccaaggcggctaagaaataaaatgggcttatatggccggtgcctagagagaaaggaaataatagcgtgaccggcaccaggacggcaatatattgcatcatttttatttttgttacatgattgcctttgactactggcaagagcggaacgccagcagcgcgatattcctctttgcgtcttatcccaatcgcccaaaaatgcggcggctgccacagaaacataatcgtgtacaacagcactgctgtcatactgaagtcaccggttacggcacaataccccatcaatggcggcgcagctcctgggaagctcccgacaaatgtgctccacacagacgttcgtttcacccataccgtatagatgatcgcataaaaaataaaggcggccagtccgagataggccgttaatggattgagggaataaagcatggcaaggcctgcgatccctaaaacagagccatatgttaagatcatggctggcggcattttccctgtgaccgaggccctgctgcgagtgcgtgccatttttgcgtccatatgccgatcaaaatagttgttatagacagtgccggaagccatcacaaacgcggttcccaacattgctgttaccattgtcatcaaaaaagccaagccggttaacgttttttctgcgcttgcaaacgcgatccaaaacccgccgaaggctgctatcgagtttgatatgataatgcccggctttgcaagtttgataaaatcgtaaatggttacccggttcgaagcttttatgtattttgtttcagatatggctgcagaatctcttgtattctccaaaaatagacgcctcccccaaaactgcatgcttttgttatcgtaacaagagggggacagaatcacaattatttcctatatttgtcatgatattgtcatttttaaaacaaaaaaatggggagctggactgcccccattttgatatgcggcgactagtaaccgtaacctccgccatatcctccgccataaccgccgccgtaaccgtgccaagggtagtaaggcggtcgcgggcgcgggtagtaataaggcgggcgcggataaaacgggtagaacggataatacggtcttggataataataaggcggataaaatggcggtctcggacgcggataataataaggctgtctttcatcataaggggtaatttgttcaaatgactgttcattcaaagggtaatccaagaggaaaacctccctagctttttttattccttttaccatattcctgatgcttaagttgggtgtatgtacattcatgaaattcggttttttttatgatgaaattccttaaaaaggattgacatgaacttctaaatctcatagtattacaaatgtgaaataaatgttactacaatgttacaaaaacatttctaaatagatacagttccaactgatgaagagtaaatcgaaatggctacgaaagaaggagtttttgttgttggcaaaaagaatcaaatggtttcatgtattaatagcagttgtatgtgtggtgggccttatcggctttttccataatcattcattgaaaaaagaaacggtcatgaataaagtaagaactgattctcaatatgggaatgttgagatcgcaacgcttgtgaatgacgggaaaacttttaattacgcggttaactatcccgttttcaaaaatgaaaaaatggattcggcattaaaaagattcgcagaaaaagaggttcgtcaatttcaaaaggaaacaaaagacgttgaccaagagcatacgacaaaacgcaacgaattaaatgttgattataaaattgtccattatgccaaacagacagtggcgattgtatttaatgaatataaatacatcggcggggcacacgggcaaaccgtgaaaaaaacgtttaactatgattttagtaaacaagcgtttctttccattgatgatattttcaaagaggacgctgactacttacataagctttcgttaatcgcttatcacgagctgaaaaagaataaggacattgccgcggacgatgcactgttaaaggaagggacggctccgaaaaaagaaaatttcagccgctttgccatcaaggaggattatatcgaactttactttgacacatatcaggttgcagcaggctatcttggagagcaatcgattgccattaagaaaagtcttttgaaagacattctgaaagaacaatatattgataaagcaaaaaataaaaataaaatcaaagaacaaaagccgaagcatgaagtgatttctttacccaaagaggaaacggttgatccaaatcaaaaagtcattgcgcttactttcgacgacggcccgaatcctgcgacaacaaatcagattctagactccttgaagaaatataagggtcatgccacgttttttgttttggggagcagggttcaatattatccggaaacgctaataagaatgctgaaagaaggaaatgaggtggggaaccattcatggagccatccgcttctcacaaggctttcagtgaaagaagcgttaaagcagatcaatgatacgcaagacatcattgaaaaaataagcggataccgtccgacgcttgtaagacccccatacggcggcattaatgatgaactgcggagtcaaatgaaaatggatgttgcgttatgggatgttgacccggaagattggaaagaccgtaacaaaaaaacaattgttgaccgtgtcatgaatcaggcgggagatggaagaaccattttgattcacgatatttaccgcacctctgctgatgcggccgatgaaattatgaaaaagctcaccgatcaaggctatcaattggtgacagtttctcagcttgaagaggttaaaaaacaaagagaagcgaaataaattaaaaaaggctgtccgtacggacagccttttttctatttaataagagcctgtggtggcccaaacatttaagtttggtcctgaatacttgccaaaagcgtaagaagtccttggatctaaatcatataccatcggtgtatagcaagacttttggccggccaccgcttttccattgccgcctgcagaatcacaattatatctctttccgtccgtgtttcgggtaatctccgcatttgcttcaaagccagacgtcaatgtattattcatcgtgatttttgcccaagccgttttacatgtactgctgaatttaagctcgactactccgatgacttgattgctggcattcactaagtttgaggatttttttgtagagccgctggacgcacaatcattgtaataagggctttttccatcgtaggcatgggtttccgcattggcgggtacacctttgacggcaaaaacaaatactactgcaaataacaccaatgaagccttcgtaaacagtcttttcatatcctttatgacctccttaatatggcaaacaataaatcatacggaggaacaatcaaaacatgcatgcttttttgtgaacaataaaggcggccgggaggatggagttcttggccgcctttgatgtgaggttaaacttttacatcaatggtttgtccgagagtcggatgctgaatcatctttaaggtttgatcggcattttgctgggcggtatccagcatttttttcgttaaagcgatattaacattctgggcaagggatgcttgatgcattgcaaccgataaagcaggaatatccatcgttccacctcctatgccttacctatcggcggctttgtatcattttacagtgaaaaatggcttaattttcgctgttgacccctacgctgcggcatatcgtatgtttttgacaaggagggaatcaggatgaatcttgtcatggaaaagacctttgagcaatacgaaaagctgttttcaatggaagaacagaaaagagaagatgaatttcggtatacgatgatgaggccgtttgaaaagatgtggaccgccatccatgttccgctgaaagcgaaggagccaaacggctatgatgtgatcatggctgcgaaaatgcttggctatttggatgtccgtgatgttgaaatcggacagaaagcactgcgaatactgaaagaatcacatgtttcagagactgcggaatctgcacttcggcaatgcatattttttgatgagcgcgaacagctgcgggtgaatgcaaaggagatcaaattcggcctttatatcgctgatccaaataagcttcagctgcaaaaaggctactgcgggtttggcgggataccgggctttattcatgtatggattgatccgaaccgttataacctgccaaggattccttccattattgctcatgagtttcatcataatttgcggttttcgtatatagattttcatcatggctctgtaagtgtcggggattatcttgtgattgaaggattggcggaatcattcgccagagagctgtttggtacggaacgattgggcccttgggtaactcgttttgatcatgaggatttgcaatattccattgatgtgattaatgaggtgttggatgtgaaaggattttcggaagtcagccgttatatgtttggtgatccaattgctaaagacaaaggatttgaacctgtaggtttatcggcttttgcgggttatgcagttggctatcatgccgttcagtcatttatgaatcaacatcatatcacgataagcgaggccacacgtttggatgcgaaggccattctttctcagtgcggattgttttccaaatgaaaaaaagcgtcacatacagcggcgctttttgattcccaaaaccagcagttctatggcggcacaggcggcaattccgattgtatatgcttcgatatcgctccataaaaaaccgtaccctagtacaagcccgccaagagaagtatctctaatctggtcgatccattcggcatgatagagctggctgaattcaatgacaaaacagaaagaaagactgataatgcccgttatcattgtcttcagcttccgaaatagaaatccgcatcccgtgaagatcatggcggcccacaacgagtctcccagataagtattgagggtatcaggaagaacactggagaatgctctggatccaagccccagcccaatgatcagtatggtgaaaactgcatatatccaacgatttcgcttcattgcgaattgataccccgtctctgcttcatctccctgtattgtaaggaatatagcttttatttgtccactaaaaaagcggctgaatagccgcgtagggtgtttattttgcttttaggtttacatggtcggctgtctgatccgtgcctattacaaaatggagttcatagcggcctgtatcatatacataatcgatttcatcggtaaacgggacggttaacacccgatttgctggtcctaattgcttctgcagcacttccggcgtaactccgcctaaattcagctgccgttccacaccggttccaaagtatcggatttctgaaattgtcatgtctttatgataggaaaatccgtagcccggctgtcccatattccagtgatataaatcaaatcgattgtctcccccgactggtctttccggttccccaaacgcagcgtggacatccccttttgtgcttttgttaatggtaaggccttgcgcctgctgaggcatttctcctttgtaggcggtgttgtaaaggtttttgacgagctcggaggctgattgggttgtattttcatagagtgtatttgtttgagctgcggcctttgccggtgctgaaaaggacgcagccccaaagccggtaaaacagcttgttactgctgctgccgcggttatagcagacattgtctttttcatgttaatccctcctaattgatctaccattccgtttccccgtgtttttgcaacgaaacatgtgagtgcgctttgtatgttttattgagttgttgtaagggaactgaaataggtaattcggtatataaagcaagaaaggggaatggagatgcctggcaagaaaaaaatcacaataaacggcgttgaaatggaagcgtccgaggaacagacggtgctgcagcttttgaataacagctcgattgaagtgccgcaagtttgctatcatccaagcttagggccgattgagacatgtgatacgtgcatcgtcagcatcaatggtgagctgaagaggtcgtgctccgctgaattaaaggatggggatatcattgatacgctctcacctgacgtgaaaaaagcgcaggtcatcgggatggacaagattttatataatcatgagctttattgtacagtttgcgattacaacaatgggggatgcgaaatacataatacggtgaaggaaatgaaaatcaatcaccaaagcattccgtttgatcacaagccataccataaggatgaatcccatccgttttatcggtatgatccagatcaatgtattttgtgcggacgctgtgttgaggcatgccaggacgttcaggtaactgaaacgctgaccattgactgggagcggaaacgcccgcgcgtcatttgggataacgacgtgccgatcaatgagtcgtcatgtgtgtcatgcggccattgttcaacggtctgtccgtgcaacgcgatgatggaaaaaggaatggaaggggaagccggatatttaacaggcatcaataacgaaacgctgcgaccgatgattgagatcacgaaaggcgtagagacaggctacggctcgattctcgccatttctgatatggaatcggccatgcgtgatgaacgaatcaaaaaaacgaaaaccgtctgcacgtattgcggcgtcggctgcagctttgatgtctggacaaagggcagagacattctgaaagtagagccgcaggaggaagcgccagccaacggcatttctacttgtgtgaaaggcaagttcggctgggatttcgtcaacagcgaagaacgcctgacaaagccgctgatccgggaaggcgatcatttccgtgaagcagagtgggaggaggtgttatcgctgatcgccagcaagttcactgaattaaaagaggcgtttggcccggattctctcgcttttattacatcttctaaatgtacaaatgaagaatcctatcttatgcaaaagctggccagaggggtcattggcacaaataatgtggacaactgctcccgctattgccaatctcctgcgactgccggcctgttccggacagtcggctatggcggtgattcaggatcaattacagatatcgcgcaagcggaccttgttttgattatcggttcgaacacgtctgagtcgcatccagtcttatccactcgcattaaacgggctcataagctgagagggcagaaagtgatcgtcgcggatatcagaaaacacgaaatggcagaacgctccgatttatttgtccagccgcgtgccggatcggatatcgtctggctgaatgcgatcgccaaatatttaatagaaaacggcaaggccgatgaacgatttttgagagaaagagtgaacggacggcatgaatatgtaaaaagcctcgcgccgtacacacttgaatatgctgaggagaaaaccgggattgatcaagaaacccttatccaaatggcagagatgatcgggcaagctgacagtgtgtgcgcattgtgggcgatgggcgtgacacagcatattggaggaagcgacacgagcacggcgatctctaatctgctgcttgtgacaggaaactacggaaaaccgggagcaggttcttacccattgcgcggccataacaacgtgcagggagcaagtgactttgggagtatgcctgacagactaccgggctatgaaaaagtgacggacgaacaagtccgccaaaaatacgagcgggcatggggcgtaccgctgccgaaggagccgggtatgaccaaccacgaaatgattgaaaaaatccattccggacagttgaaagcgatgtatgtaaaaggtgaagaaatgggccttgtcgactccaatatcaatcatgtacacgctgcatatgaaaagcttgatttctttgtggtgcaggacattttcctttcacgtacagcggagtttgctgatgtggttcttcctgcgagcccaagccttgaaaaagaaggaacgtttacaaacacagaacgccggattcagcgtttgtatcaggtatttgaaccgctgggtgaatcaaagccggattggcagattattatggaggttgccaataagcttggcgccgactggctctatgagcatcctgcagacattatggaggaagcagccaagctgtcgccgatttatgccggtgtcacctatgaacgtcttgagggctataattccctgcaatggcctgtaaacgctgatggaaaggattcgcctttactctttacagagcgcttccctttcccggacggcaaggccattctctaccctgtccagtggacagagcctaaggaattcggtgaggaatatgatatccatgtcaacaatgggcggctcttggagcacttccacgaagggaacctgacttacaaatcaaaagggatttcggagaaaacaccggaagtgttcttagaaatttctcctgagcttgcggcagaacgagggattcaggacggaaccctcgtcagactcacatcgcctttcggaaatgtcaaagtgaagtgcctgattactgatcgagtcaaagggaaggaagtatatctgccaatgaacgattcaggggaagcggcgatcaacctgttaacaggcagccatgccgataaggataccgatacgcctgcttacaaagaaacatcggccaagatggaaattttgaagcacgacggaatcagcccgctgcctaagatcaaccaccgcaacggcaatccgcagccgcaaatcggtgtgcaggttcataagaaatgggcgcggaaggattatattttccctggtgacgctgtgaaaagggggatgggccataatggctaaagcgattaaacgaatccaaaaaatcgaggtaacagaagaggatcagcgaaagcgtgatttgcgggaaattgaagatgctctaattgaccacaaagaagcgattctcgaaacattgcatatgctgggccatatgaacgagcgcggtgtcctgccgttgctccgcggcctttttggccaaggggataaagttcttgatatcctggtgaaaaaggcagatacagaggaaacagccaatacgctgaaaaatctgcttcttctgtttggaacactcggcatgctggacgtgaagcagctggagcctctcattttgaaagtgaatgcgggtgtggcaagcgctgtagagcagaaaaacagtgaagaaaagacaggttattttgatattatccgctcgctaaaagacccggaaatcaacaaatcaattacactgctcttttcctttttaaaaggaatgggacaagatacaaaggagctggaacgcacgacgcagcctccggaacaccaaaaacatcatcaggaacctcgagagaaaagaggaatgaataagcgagattgacctcccacccgagcggcttcagccagctcgggttttttgatgaaaaggtctaatggactagtaaaaaatattcaaatactaggaagaagtaagattgtgatgaatgagatagaaataatcgttactttcttacctgttaagaaaaggaaaaatctgattataatagaaatcgattactttagatgggggaacaatcatgaaaaaagtcttattactattatttgtcttgacgatcgggttagcgctttctgcgtgcagccaatcgagcgatgcgtcagagaaggaaaaaccgaaagagaaaaaatcgcaagaagagcttgaaaaggaacttgataaggaattgaaaaaaggcggtgagccgaagaccaaaaaagatgatcaaatacataaaataggagaaacatttaaagcaggacatacgaattttacagtgaataaagttgatagagtgcaaaaaggtgaatatatgaatgttggcggagctgtaaatgaggagacaaaaacaataaaagatgatgaggaacggcttattatagaagttacgatggaaaatataggggaagattcaataagctacaattttatcgggtttgatttaagagataagaatgatcaatcagtgcggcctgttttttctatagaagagaagggcagaatccttatgggaggaacactagtatcggggaaaaaggttacaggtgtactcagttatgtcatccctaaaggagaacagaaacattacacactggtatataatccgtttttagctgatacaaatagcagtaatacagaagagagagtaaaggacgatattgattacttggtgaagttagattagaagctaatttacagttgcacgtttttcatctgtggaaaacgtgcattttttatagcgaaacttgacttgaaaggatgagtgataaaagtgcaaaccaaatggctggaacgggcacagcgaattcgggcgatcgcacaggctgggcttgctttttccaaggatgtgtacgacagggagaggtacgaagagctaatgaagcttagcacggaaatgatggcggattactcggagaaggacattgaagttatcactgatttatggcaaggcgagaagggctatccgacaccgaaagcggatgttcgcggcgcagtattccgagagaatcagattttgcttgtccgggagaagcatgatgagctgtggtcgctgccgggtggattttgcgagattggtttatcgccagctgaaaacgtcgtcaaggagatcaaagaagagtcggggtacgatacagagccgtctcgattgctggccgtgctagacagccataaacactctcatccccctcagccttatcactattataaaatcttcatcgcatgcagcatgacgggcgggcagggggaaacaggggtcgagacgaatcatgccgctttttttccggaagacagactcccgccgctctctcctaaacgaaacacaccctcacagcttagcatgctgtttgactttttgcgccatccggacaagaaaacgatatttgactaaaaaagaaagagcctatgggctctttcttttttataatgtaatgtgtttttcgttggcgagtttcagaagggtcaaaatagaatcggcttgtttatggccgagtttttgctttaatttgttttcttcaactaatcggctgccataaattttgacagaggctttgtcgacgacagtatgccagttttcctgtttttttccctcaacaagcggtttttcatgtctctcagaaaaagagaacacaaacagtacgaatgcaagtgaaagtaggatgccgacaacttgttttttgtaatcagtctgtgctgccacgttgttctctccttcaccttttaccttctatttaatcatagaatcagcttattttacataatgggaaagtcatttttggagttagtgcatttggttgaaaacagaggcgttttttgagcggagcggtgcaattgaatctatattggctttgcgtgcttatgcctaaggtcacgttgtgaaccaaaacagcagtgcagaatagaaaaaaattgaaagattatggtaagatgaacgaaattcgagggggaatatatgatgcctgcatcaaacatcgtgatcgcctgcctgctgttatcaatttaattatttgtggtagtccctctctttttcgaaagcgggaggtgaagtggaacattaattgctgaattctttcaaggggagtgaccgtacatgaatgtgttaaaccgccggcaagccttgcagcgagcgctgctcaatgggaaaaacaaacaggatgcgtatcatccgtttccatggtacgaatcgatgagaaaggatgcgcctgtttcctttgatgaagaaaatcaagtgtggagcgtttttctttatgatgatgtcaaaaaagttgttggggataaagagctgttttccagttacatgccgcagcagacaagctctattggaaattccatcattaacatggacccgccgaagcatacaaaaatccgttcagtcgtgaataaagcctttactccgcgcgtgatgaagcaatgggaaccgagaattcaagaaatcacagatgaactgattcaaaaatgtcaggggcgcagtgagtttgaccttgttcacgatttttcatacccgcttccggttattgtgatatctgagctgctaggagtgccttcagcgcatatggatcagtttaaagcatggtctgatcttctggtcagtacaccgaaggataaaagtgaagaagctgaaaaagcctttttggaagaacgagataagtgtgaggaagaactggctgcgttttttgccggcatcatagaagaaaagcgaaacaaaccggcacaggatattatttctattttagtgaaagcggaagaaacaggcgagaagctgtccggtgaagagctgattccgttttgcacgctgctgctggtggccggaaatgaaaccactacaaacctgatttcaaatgcgatgtacagcatattagaaacgccaggcgtttacgaggaactgcgcagccatcctgaactgatgcctcaggcagtcgaggaagccttacgtttcagagcgcccgccccggttttgagacgcattgccaagcgggatacggaaatcggggggcacctgattaaagaaggtgatatggttttggcgtttgtggcatcggcaaatcgtgatgaagtgaagtttgacaggccgcacatgtttgatatccgccgccatcccaatccgcatattgcgtttggccatggcatccatttttgccttggggctccgcttgcccgtcttgaagcaaatatcgcgttaacgtctttgatttctgcttttcctcaaatggagtgcgtcagtatcactccgattgaaaacagtgtgatatacggattaaagagcttccgtgtgaaaatgtaatagataaggagactggagattcatgaaaaagtaccatatttcgatgatcaatatcccggcgtacggacatgtcaatcctacgcttgctttagtagagaagctttgtgagaaagggcaccgtgtcacgtacgcgacgactgaggagtttgcgcccgctgttcagcaagccggtggagaagcattgatctatcatacatccttgaatattgatcctaagcaaatcagggagatgatggaaaagaatgacgcgcccctcagccttttgaaagaatcactcagcattctgccgcagcttgaggagttatataagggtgatcagcctgatctgatcatctatgactttgttgcgctggctggtaaattgtttgctgaaaagcttaatgttccggtcattaagctctgttcgtcatatgcccaaaatgaatcctttcagttaggaaatgaagacatgctgaagaaaataaaagaagcagaggctgaatttaaagcctacttggagcaagagaagttgccggctgtttcatttgaacagttagctgtgccggaagcattaaatattgtctttatgccgaagtcttttcagattcagcatgagacgttcgatgaccgtttctgttttgtcggcccctctctcggagaacgaaaggaacaagaaggcctgttgattgacaaggatgatcgcccgcttatgctgatttctttgggtacggcgtttaacgcatggccggaattttacaagatgtgcatcaaggcatttcgggattcttcatggcaagtgatcatgtcggttgggaaaacgattgatccagaaagcttggaggatattcctgctaactttactattcgccaaagtgtgccgcagcttgaggtgttagagaaagctgatttgttcatctctcatagcgggatgaacagtacgatggaagcgatgaacgcaggtgtgccgcttgtcgtcattccgcaaatgtatgagcaagagctcactgcaaatcgggttgatgaattaggccttggcgtttatttgccgaaagaggaagtgactgtttccagcctgcaggaagcggttcaggctgtatccagtgatcaagagctgctcacccgcgtcaagaatatgcaaaaggatgtaaaagaagctggcggagcggagcgtgcggcagctgagattgaagcgtttatgaaaaaatccgctgtcccccagtaaaaacataaaaaccgaaatcaatttgatttcggttttctgtttaaatattttttttcatcccgcatctccggcattctctaagaaattttccgccttttacagagcttttgaacagtgtgtaatcacagttgtcgcagcgcccgctgcgggcgtccggatattcattgaattcgtaaacgatcgatgtatcgtagccttttgtttcatattcttctttttttgtttccatgtcgtccctccgttacaagacgtgtctgctgtttatcttacagcaagcttccggcgtattcaatggattttagaggtttgggtttatcttgatttctcccttggtttgcgccaaaatagctttaataagcttgtatacataaaaagcctatgcaaagaggagaggaaacgggtatgggaaaagggttacttggaaaacgtgtggcaatcggtggctcacgaaaaacggaagaaatcagtacaatcattgaaaaacagggcggaatacctgtcatccggcctctccaaggtacagtttacttagcagagaagcaggtggagccggatttgcggacgtttgcggaagaaaaagctgactgggtcattttcacgacaggcatcgggttggagactcttgtcgatatggcagagaaaattggactgaaagatgaatttctgcaggccattcgccaagcgaaagcggcatgccggggatacaaaacgctgtctgcgctgaaaaagcttgggatcacaccggaagcttcggatgaagacgggacaacaagaggcttaatccgttctttggagcctcacgacttttcaggaaaaacagtcatggtgcagcttcatggcgaaaaagcgccggctctcatggcatttcttgaagaaaaaggcgcgtctgtcctgccgattctgccttatcagcacatcccgccggaggaggaaacggtggagcggttatgccgagagctgatgaaccgtgagatcgatgccgtttgttttacaacggccattcaggttcgttccctgtttgattttgccaaggggcgaggttatatcaatgaagtgaagaaggtattcgaagaacgcgccatcgcagctgctgtcggaaaagtgactgctgaagcactgcgggaagagggcattacgagactgcttgcgccagagattgagcggatgggtgcgatgattgttgagctggccaagtattatgaagaaaaggaataacaagtacaaaaagccgcttttccctcggaaagcggcttttgtctgtcattcattctgcttcagctgctgatgaacggtgaataatgatgggtatgtcagcacgcttaagattacacaagtcagcgcggctgaggccatcgttgtaaacacgattaagagttgaaagcgtactgcctgaatcgggtccgcgccggctagaatctggcctgtcatcatgccgggaagctgaacaagacccagtgttttctggctttcgagcgtcgggatcatactcattttcatcgctgaagtaagaatgcgctgtatggattgcttcggtgtgccgccaagtgacaatattaattgaatttcttctttgcgaacgccgacttctgagttaagccggtttagaaacaaacttgagagcaccatcgaatttccgatgaccatcccgctgatcggaatgacatatcgtgccgtaagcggaatgatatgaagagacagcagaattccctgcgtcaccatttctacgattgctaacgcggcaaacaccctccaaaacgaaccgattgtatttttctttcgcttgatgacattttgcgccgccaccgcgagcattaacagcaccatcagcaggataaaaacagggtggtctccgcgaaaaatcagcgacaaaacataaccgatgataagcagctgcaccgcggaccggatggtggcgatgatcatgtctttttctaccccggctttaaaggattttgataaaaacaaggcgatcaaaacaaagatcatcgttaaagagagagaaaggtaatccattaccgagtgcctcccttcaaaaattctttcgctgcttcatgctgcggagcggagaaaaatgtttcggtttcggcgatttcaagcagccggccatctgccataaaccaaatggtatcggctactcgttttgcctgctccatattatgagtgacccacatgactgtccattttttctcttgatgctgacgtttgatcagttcttcaatctcaagagcagaaaccgggtccaaggccgacgtgatttcgtccaacaatagaatggaggaaggatttgagagcgttctggccagtgacagtctttgccgctgcccgcccgataagtctctggcgcttctgtctaacagctctggcggcagccctgcaagagaagccagcttttcaggagagtacagctgggattgatgcagcctttgtacaagacttaaattgtcacgcactgtcccgtcgagcacgggagccgattgaaacgcgagggctgccgttctcctcagctcattgacattccattctctgacttcctttccatatatgttgacttcgccgctgtcaggcgttctcattaaattacacatagaaaggagggtgcttttgcctgagccggaagggcctaaaacggctacgattgcaccctgttgaatgtctccggtgacatcctgcagcacatcataggtttgtccatcttgtttatagctttttctgactgatctgaaggagatggctggtatgttttgtgtttgatcgtttgcttccattacaataatcacctttcaatataagtaggctgacattatatttaactataacgtgaaacagattccttttggtagcacaaataaaggagaacaggctttcacccattctcctgcagatgctacgcagtcagatttgactgtgctttctttttcggttttctcggctgtgaagcgaaggtatgtaacatcatccccgctattataatgaacaaaccggcaaatgataatagagatgggaaaacgcctgacagcagaacaatttcaccaagcagcgcgaaaatcacttcaccggattgagtggcttcaacagctgcgagtttttgcggattgtctcttaccatatcagtagcccagaaaaataaaaccgtcgcaatgatgcctgagctgacggcaacgataaaggattgaacggtttgacttgctgttggaaggccatctgaccaccagccgtaagctgctaatataagccagaatggaaggcttgccaatgtcattccaagcacgcgctgaaatgtatcaagccggcctccgtattcttcgagcattctcctgtttcctaacggataggcaaaagccgcaatgacaaccggcagcacactgaaaagcagcatcctcccagaaagcgattctgcatgctgaagctgaatcagagccgctccaatcaggatgatcacggaagtgccaagtgaaaccaggggaatcttttggcgaacgagctgcggaccgcccggcatatcttgtttgacataaaacaaaggagataagagcaccccggctacaattgtaatttgccaggttccggctatgagccaccccggaccgtatgcagccgcaaatgtaatcggcgcgtaaaaaagcacgaaaccgacgaagctccatttgatccaataaaacggctttttcctcatctctagtaagagaggcgtgaatgtccctctcatgatgacaatcaaacataaaaatggcaccataaaaataaagcgcagcgaagagctccaaagccagctgcctcctgataactccatcgctctgtttaatataaaggtaacggcgaaaaagagtgaagccaatattccgataacgatagctttcatgatatccctcattctggcattatttttttatactatactattcggtatcatgcagatcaatggaatcatgagaaaaacatcatgtttggcgaactgctatgtgtggaagacaaaaaagggaggtgaaattgatggaaaaagagacacagacatacttctttccggatgacggcaggattccgaatcaccctgattttccgctcgtggtgtatcaaaacgcgcttaaggacactggactggcagagcggatcgtcatccggcatggctggtcaaacagctggtcagggagtgtttttccataccatcattatcacagcaatacgcatgaagtcctgattgcccttaggggagaggctgtgattcagtttgggggagaaaaaggggctgccatccctttcaaatcaggcgacgcagtcgtgattccagccggagtcggacataaaaagctcagctcaagccccgattttactgtccttggcgcctatcccggtggcattcagtatgatatgaagacgggaaagcccaatgagcgagaggaagcggtcaaacagattaagcaggcggcgttgccggcgaatgatccgatcacaggaaaaagagagcctctattggaaatatgggtaaagtgaaggggagaaattgctggattgtcaataactagtgccgcagaaacgatatgacatgtgctccatataaattaatttcataatcgaagcaattcacgttcaaattttgttcaaaaagtgttatcatatagaaggtaatcgaattggagttttttgtgtttgctattttcagagagagtaaaggattttgacttattcaattgtttatttttagataaaaataatactgaatatggcaagatgaaaaactgggtagtaaacatttatttttgtaaatgattgtgcacgaattcacaatccttattcttatgccttaaaagcgtgagacagggagaggcactaccctttccaaaaaaatcagcaaactgcttatagtaaaggagaattggatatgccagaaacaatcgatcaaacaaatgcgtctgtcagccaaagccagcaagatcttattgatcagctattaaagccagaagttcaagaatcattgactgttttagttgaccagcttccgaagctgactgagttagtcaatattttaacgaagtcttatgatttcgctcagtctgtagcgactgacgaagtgttaaaaaacgacacagtcggtgcgatcactgaaattcttgagcctgtaaaagaaacagcgaaagaagtagctgcgactgcgatcgaagcaaaagaccgcgcggaagcaagcaacgaaacaattggtcttttcggcctgctgcgtatgctgaaagatcctcaagctcaaaagttgttccgttttgctaacagctaccttgaagtcatgaacgaacgcgaaaaccaaaaataatctcagattcaaattgatataaaggacggaggatatacgatgtcaaaacatattgtcattctaggcgctggttatggcggagttctttctgctctaacagttcgcaaacattacacaaaagaacaagcacgcgtgacagtggtaaacaaatacccaactcaccaaatcattacggaattacaccgccttgctgcaggcaacgtgtctgaaaaagcggttgcaatgccattagaaaaacttttcaaaggcaaagacattgatcttaaaattgcggaagtaagctctttctctgttgataaaaaagaagttgcgcttgctgacggttctacattaacttacgatgcgcttgttgtaggtcttggttctgtaacggcttacttcggcatcccaggtcttgaagaaaacagcatggtattgaaatctgctgccgatgcgaacaaagtctttcaacatgttgaagatcgtgtgcgcgagtactctaaaacgaaaaacgaagcagatgcaacaatccttatcggcggcggcggcttaacaggtgttgagcttgttggtgagcttgctgacatcatgccgaaccttgcgaaaaaatacggcgtagaccataaagaaatcaaattaaaacttgttgaagcaggtccgaagatccttcctgttcttccggatgatcttatcgagcgtgcgactgcaagccttgaaaaacgcggcgttgagttcttaacaggtcttcctgttacaaatgtagaaggaaacgtaatcgatctgaaagacggatctaaagttgttgccaacacatttgtttggactggcggcgtacagggtaacccattagtcggtgaatcaggtctagaagtgaaccgcggacgcgcgactgtaaatgacttcctgcaatctacatctcatgaagatgtattcgttgctggagacagcgcagtttacttcggtccagacggccgtccatacccgccaactgcacaaatcgcatggcaaatgggtgagctgatcggttacaacctattcgcttacctggaaggcaaaacgcttgaaacattcaagccagtaaactctggtacacttgcaagccttggacgcaaagacgcggttgccatcattggtgctaattctacaccgcttaaaggtcttcctgcttccttgatgaaagaagcaagtaacgtacgttacttaacacacattaaaggacttttcagcctggcttactaatccttttaatgaatctgacattgccaaaagcgttccttaccgagtgctttctggcaatgtctttttttatgtttatgacagcgttaacatttcattttcaaaaaagagattgatcccagaggaatataaaggtaaaataaaaacaaatcaaaatgttaacgttaacattttgaaatagaatgaaagacggtgaggacatggaacccttcatgggcgaaacctttttattgaaaaatgaaaccgctgtcagcctctatcacaattatgcgaaagacatgccaattattgattaccactgccacttaagtccgaaagaaatctatgaaaataagacatttcaaaacatcacggaagcctggctgtatggtgaccattataaatggcgcatcatgagagccaatggaattgaggagacatacattaccggagatgcgcctgatgaggagaaatttatggcttgggcgaaaaccgtgccgatggcgattggcaacccgctctacaactggactcacttagaattgcagcgtttttttggcatttacgagattttaaacgagaagtccgggccggctatatggaaacggacaaatgaactgctcaaaggggaaggcttcggggcaagggatttaatcgtgaaatcaaatgtaaaggttgtgtgcaccacagatgaccctgttgattctcttgaataccatctattattaagagaagacaaagactttcctgtcagcgtgctgcctggatttcggccggataaagggcttgagatcaatcgtgaaggctttcctgagtgggtgcaggcgcttgaagatgccgccgccatatccattgcaacctatgatgagtttttaaaggcgttggaaaaacgagtgcgattcttccactcagccggcggcagagtttctgatcacgcgatagattcaatggtatttgccgaaacaacaaaagaagaagctggacggattttttctgacagattacaaggaacagaggtttcttatgaagatgagaagaaatttaagacatatacgcttcagtttctttgcggtttgtatgcggagctcgattgggcgatgcagtttcatatcaacgctttaagaaacacgaatacaaaaatgatgaaaaggcttggacctgatacaggctatgattcaatgaacgatgaagaaattgccaagcctttatacaagctgctgaactcagttgagatgaagaaccagctgccgaaaacgattttatattcactgaatccaaatgataactatgtcatcgccagcatgatcaacagttttcaggacggtattaccccgggaaaaatacaattcggcacagcctggtggtttaacgatactaaagacgggatgctcgatcaaatgaaagcgttatcaaatgttggccttttcagccgttttatcggcatgctcaccgattccagaagctttctttcgtatacgcgccacgaatatttcaggcggatcgtctgcaatttgattggggaatgggtggaaaacggcgaagtgccgcgcgatatggagcttctgggaagcatcgttcaggggatttgctatgacaatgcgaaacactactttcaatttcaagaagagaaagcaaacgtgtaacaaagtgtccgctcagtatcgctgagcggatcactatccgaaaattcttaagacacagaggtggaacatgcgaactgaactggcaaataaggttgtgtcggtcgaaacggaaaaaaggctttcattgaaagagaaaatgtcctatggttttggtgattttggcaatggttttatgtttgatctcggccagatttatttattgaagtatttcactgatgtagcgggaatccccgctgcgatggccggcggcatttttttagtcagtaagctgtttgcggcgataacagatccaattgtcggctcatcaatcgattatcgcaaaaacatcggcaaacgggggaaattcaggccttatctattaatcggcagcctcgtgcttgcggtgcttactgttcttatttttctgtctcccaatgtatcaacgactggaaaactgatttatgcatatgcatcctatatgatttggggcatcggctattcgtttgtgaatattccgtacggctcattaggggcagcgatgactcaaaattctgaggaacggacctccatttcgacgttccgccaaatcggatcacttggcgccttgtttatcacaagtgttgccgtgatgccgctgctcatcaagtttgataatccgaaggtcggctacccggtggtcatgggcttgttcgccgcactcggtgtgctttggttttatatttgctaccgcaactgcaaagagcgcattgtcatatcggaagcacccaaagaaaaattaacactctcatctgtcgtcaaaacatttattacaaataaaccgctgttaacccttgtcctgatgacgattttttcaatttccgcatacaacattaaatccgccatgctcgtctatttcgcacaatataacctgggcaatgttgaattaatggcttatatgaactttataattatcggttcttcctttttgggcgtcgtattccttccaaagctcgtcaagatgtttggaaagaaacgaacggcaatgatcggcttcggcatcagtgtggccgcggatctgatcaactttatgcttccatctaacgtttatgtgtttacaattctcgccagtatcgcctttattggaatcagtatcccaaatggcatcacgtgggctcttgtctccgatattatcgactatggcgaatggaaatccggtgaacggaaggaagcaacgacatattcacttttcaatttctccagaaagcttgctcaatctttgtctggctttctctcggggatcggtttggggattatcggctatgttccgaatgcagtccagacagcacaggcgctgattggcatcaaagcgctgcttcttctgtatccggccattgctttggcattagcgatgatcattatcagctttctttataaactcacagaccagcagcatgctcagatcgttcaggatcttcatcaaaagaactgacaatataatataaagaatatttaaaataatttgtaaataaaatgtgtttgtaggggtttcgctaggggagtgcccaaaaaactgaaaaggaaggaggcacttgtttgaaaacgataacaattgcagctaaagaagcaaaggaactcgttcggcaaaagctggccagtgccggtttgaatgaacgagatgctgaaaaagtagcagatgttctcgtgcacgctgatttgcgcaatgtacattcgcatggcgtgctgcgcacagaacactatgtaaacaggcttttagcgggagggatcaatcctggggcacagcctgtttttaaagaaacggggcctgtgaccggggtgcttgacggagacgatggtttcggtcatgtgaattgcgacatggcgatggaccatgcaattgacatggcgaagaaaaaaggagtcggcatggtcacggccgtaaacagcagccattgcggagcgctaagctattttgtgcaaaaagcggctgacgaaaagctgatcggaatagcaatgacgcatacagacagtatcgttgtcccgtttggggggaggactccttttttagggacaaatccgattgcttacggtgttccggctaagcataaaaaaccgtttatcctagatatggcgacatccaaagtggcttttgggaagattctgcaggcccgtgaagagggcaaagaaattcctgaaggatggggagtcgatgaaaacggagaagcagtaactgatcctgacaaggtcgtctcactttcaacattcgggggcccgaaaggctatggactatcgattgtggtggatgtattttcaggattgctggcgggcgcggcttttggccctcatattgccaaaatgtacagcggtcttgatcaaaaaagaaagctggggcattacgtttgcgcgatcaatccagccttttttactgactgggatacgtttttagagcagatggatgccatgattgatgaactgcagcaatcaccgccggctgttggattcgaaagagtgtatgtgcccggcgagatcgagcagctgcatgaagaaagaaataagaaaaacggaatttctatcgcccggagcgtgtatgaattcttaaaaagcaggtgagaaaaatgaaagcggttcaagtgcgaaaagcgtatgatctggtgacagtggaggtgaagaagccagttctttcaaaggatgatgaagtgctcgtgaaagtcaagcgagtcggcatttgcggttcagacatgcacatttatcatggaacgaatccgctcgctaccctcccgagagtcatcggacacgaggtaacgggacaagtgaaggaagttggtgcgaaagtacagagcctaaaacccggtgatcatgtggtaattgagccgatttcttattgcggatcgtgctatgcctgccgcaaagggcggccgaatgtttgcgccaagctttctgtatttggcgtacatgaggacggaggcatgcgggaatatattgtgcttccggaaaggcagcttcacgcggtctcaaaggacttgccttgggaggaagcagtcatggccgagccttatacgataggcgcccaggcagtgtggagaggccaggtggaaaaaggtgataccgtcctgatccagggagcggggcccatcgggatctgtgtgttgaaaatggcaaagctggcgggtgctgttgtcatgatgactgacttgaacgatgagcggctggcatttgcgaaagaaaacggcgccgatgctgttgtaaatgtccaagcagaacatgttgccaagcgggtccttgaatggactgggaatgaaggagcaaacgtggtcattgatgctgtttgcctgccggagacttttgcgctttcaattgaggctgtgtcaccggcgggacatgtggttgtgcttggatttgatgaaagagcggctcagatttctcagctgccaattacaaaaaaagaagtcacgataaccggatcgcgattgcagaccaatcagtttccaaaagtggtagagcttttgaatggaggccggttagtgcataacgggctggtgacccatacattttcagttgatgacgttcatcatgcatttcagtttattaaggagcatccagatcaggtgcgaaaagccgtcatcacgtttgattaaatgactgaatccggaggtgcgagcatgaatatgacattccgatggtatggaagaggcaacgatacagtcacacttgaacacgtgaagcaaattcccggtgtcaaaggcatcgtttgggctctccatcaaaagcctgtcggcgacgtgtgggaaaaagaagaaatcagagccgagaccgaatatattcaatcctatggttttcatgctgaagttgtagaaagcgtgaatgttcacgaagcaattaaacttgggaacgaagaacgcggccggtatattgaaaactacaagcaaacgatccgcaaccttgccggatttggcgtgaaagtgatttgctataattttatgccggtttttgactggacacgcacggacatgttccggccgctagaagatggatcgaccgctctgttttttgaaaaggccaaggtggaaagccttgatcctcaagagctgattcggacggtggaggatgcatctgacatgacactgccggggtgggagcccgaaaaattagctcggatcaaagagctttttgctgcctacagaacggtcgatgaagaaaagctatgggacaatttatcattctttttgcaggaaattcttcctgttgctgaggcctatggtgttcaaatggccattcatccggatgacccgccgtggccgattttcggactgccgcgcattatcacaggagaggcaagctataagaaactgcgggcgatatcagattcaccgtctaattgtatcaccctttgtacaggttcaatgggagccaatcccgctaacgacatggtggagatcgctaaaacgtatgccggcatcgctccattttcacatattcgcaatgtgaaaatttatgagaatggcgattttattgaaacatctcatttaacaaaggatggttcgatcaacattcaaggcgtgatggaagaactgcataagcaggattacgaaggatatgtcagaccggatcatgggcgccatctttggggcgagcaatgccgcccgggatatggcttatacgatcgggcacttggcatcatgtatttgaacgggctgtgggacgcttatgaagcaatggcaaaaaaagaggtgggcatatgatcccgctgcatgagaacctggctggtaaaacggctgtcatcactggcggcagcggcgtgctttgctctgcgatggcccgggagctagcccgtcatggcatgaaggtggcgattttgaatcggacggctgaaaaaggccaagcggtcgtgaaggagataacggcggctggcggcacagcgtgcgctgttgctgcggatgtgctggacaggatgtcactggagcgggcaaaggaagacatccttggccaatttggcgctgttgatctgttaattaacggggctggcggcaatcatcctgacgcgataaccgatgtggagacatatgaagaagcgggagaaggccaatccttttttgatatggatgagaggggctttctaactgtattctccaccaacttcaccggtgcgtttctggcctcgcaagtgtttggtaaagaactgctgaaggcggattcacccgcgatcatcaacctttcttccatgagtgcttattcacctatgacgaaggttccggcatacagtgctgcgaaagcatccatcaataattttacgatgtggatggctgttcattttgccgaaaccgggctgcgggtcaatgcgattgccccaggcttctttctgacaaaacaaaatcatgatctgctgatcaaccaagacggaacgttcaccagccgatctcacaaaattattgcgggaacaccgatgaagcgcttcggaaaacccgaggatttgctcggtacgcttctttggctggcggatgaatcctattccggttttgtcactgggatcaccgttcctgtcgatggaggatttatggcttattcaggtgtgtaacgaaagcggtgcaacagaaactgaaccaacataggggtgaggttgagatgttttcaaaagataagcttcccgttatcctttttttgttcctggcaggggtgattaattacctggatcgctcggcgctttccattgcagctccttttattcaggatgatctcacattgtctgccacgcaaatgggcttgattttcagcagtttttcgattggttatgcgatttttaactttcttggtggcgtggcatccgaccgctatggggcaaagctgaccttgtttgtcgcgatggttgtttggtcgctgtttagcggagcagtcgccctcgcttttggttttgtcagtctgctgattatacgcattctcttcggaatgggagaaggcccgctttcggcgaccatcaacaagatggtgaacaactggttcccgccgacccagcgggcgtctgttatcggtgtaaccaacagcggcacgccgctcgggggagccatttccggcccgatagtcggcatgatcgcagtggcgttcagctggaaggtatccttcgttctcattatgattattggattgatatgggcagtgctctggttcaagtttgtcaaagaaaagccgcaagagacgattaaggaagcaccggcaataaaagcagaaacgtctcccggagaaaaaattccgctcaccttttacctgaagcaaaaaacggtcctgttcacggcgttcgcttttttcgcttacaactacatcctcttcttctttttgacgtggtttccgagctatcttgtcgacgagcggggattaagtgttgaatcgatgagtgtcattacggtcatcccgtggattttaggctttatcgggctggctgcggggggatttgtttctgactatgtgtacaaaaaaacggcccgaaaaggtgtgctgttctcgcgcaaggttgtgcttgtcacgtgtttgttttcatcagctgtcctgattggatttgccgggcttgtggcaacgactgcgggggctgtcactcttgtcgctctgtcagtgttctttctttatttgaccggtgctatctattgggctgtcattcaagatgtggttgatcaaaacaatgtcggttctgttggcggcttcatgcatttcctcgccaacacggcaggaattatcggcccggctttaaccggatttattgttgaccaaacaggcacgttttctggagcatttttgcttgccggagggctggctgtcttcgcttcacttgctgtgattcgttttgtccgtccaatcatcggcaagccagcgggaacagaagctaagaatcctgtgtcttattaatctggaaatatagtgggagaggcggtatatttgatgatacaatatacagtaaataatcgcagccggtatgataaggaagggaattagatggtaaccataaaagatatcgcaaaactcgcaaacgtatcccacacaaccgtttccagagcactcaacaacagcccttacatcaaagaacatacgaagaaaaaaatattagagctagcagagcagctcaactatacaccaaatgtaaatgcgaaaagtttggcgatgcaaaagtcgcatacgatcgggcttttctttacaagcattacaaacggaacctcacacagcttctttgcagacacaatcaaaggcgtcaatcaagccataagtgaggattacaatctgtatgtgcgcggcattgatgatctgaaaaactatgactccgttacaccgatgagatatgacggcatcattttaatgagccaaagtgacattgataattcttttatttaccatattcgcgaaaaaaacattccgcttgtcgtgctgaatcgtgatattgatgatcgcaccatcacgaatattttgtctaatgacaaggaaggctctcaagaagctgtagaatacttcattcagtccggacatcaagacatcgccatcatcgaggggatcgaaggctttaaatcctcccagcagcgaaaggaaggctacttatctgcactgattcaacatcatattccgatcaagcatgaatacagtgtcaaaggacagtacgatatggaaagcggctttcaagcgatggagcggctgctggcactgccgaatcctccaaccgctgttttttgttcgaatgatgacatggcaatcggagcgatgaatgcgatattcgcaaagggcctgcgcgtccctgatgatatttcggtgatcgggtttgatgatattggtttttcacagtacatcacgccaaggctttcaacagtaaagcgcccagtggagaaaatcagcgtgcttggcgcgcaaaaactcttgtctctgatcagcaagcccgaaacaaaagcagaaaaaatcttggaaaacacagaatttatggtgcgtgattcagtcaggcgattgacgacgtgatgtcccgtttttcagcgggcattctttatacagaaaaatgttaacgtgtgcataaaaggagagggaggcaatacgggtgcagaagctgaataaaaatgtgtacgatcactatactcagtatccagaaaaaattctccagttcggagaaggaaactttcttcggggatttgtcgattggcagattgatcaattgaatcaacacactgattttaatgggagcgtggcagttgtccagccaagaggctcagaaaaaatcaaacgattaaatcagcaagatggattatatacgctttttttacaaggaatgaaagacggagaagcggtaaacgagcatatgattatcaactcaatcagccgggggattgacctgttttctgattatgaagcatacaaagaattggcatcaagcgaaaggcttcggtttattatctccaacaccactgaggctgggattgtatgtgatgaaaaagatcgtttagaggataggccgcaaaaaacattccctgggaaattaactgcatttctctacttccgctatcaggcttttaaaggagatcagacaaaagggtgtgtcctaatcccatgtgaactgattgagaacaacggcgaaaagctgaaggaaacggttcttcattatgcaggtctgtggaagctggaggaaggatttacacagtggattcatgaggccaatacattttgtaatagtttagtagaccggattgttccgggttttcccgtcgacagcattgatgagatcacggcggatcttggctatcaggatgatttgatagttgtgggagagcaatattatttatgggttatcgaggggcctgattggattggaaaagaacttccctttgcggctgcagggctccatacaaagatcgtcagcgacctcaccccataccggactaaaaaagtaagaattttaaatggcgctcatacagcaatgacgccagtggctttattatacggcttgaagactgttagggatgcagtcgagcatccggaagttgggcgatttataagagagctgattgatgacgaaattcttcctgttttaaaaatggaaggtctttctcagtatgctgacgatgtgctgaaccgttttaaaaacccgtatattaagcattacctggaaagcattgcattgaacgccatttccaaattcaaaacgagaaacctgccgacacttaaggaatatgctgaacaaaagggacagcttcctgaacgcttggtgttttctttcagtgctcttctgtatttttatcataataatgagacattgcaggatgatccggcagttcttcaatttttcaaagaggtttggtgtcaggaggatggcgacatgcttcggattgcatcaagagtgttaggcgaacagtggctgtggggggcagatctcaatgagataccgaagctgactgatagagtcgctgtttacttgaatcatattcatgagctgggcatgcagcgggctcttgaacaatactgcatacaagggggagaggtacgttgaagtcgtttataaagattcataagcaagataatgtccttcttgctctgcgggatatccaaaagggagagaggctgcatgcggacagcgtgtcgattgaagtaaaggatgatataaaaagaggccacaagattgcattgaagcctattaaaaaaaatgacagcatcatcaagtacgggtttccaatcggtcatgcatcacaagatatatcgatcggagagcatattcatgtccataatacgaaaacaaacctgtctgatatccaatcatacagctatacaccgagatttgatgaaaatccgtattctaatgagaaccggacgtttaaaggttttagaagagaaaacggagatgcgggtgtacggaatgaattgtggattgtcccaactgtcggctgtgtcaatggaatagcagaaaaaatgctgcagcgttttgtcagagaaacaggggatattgctccatttgataacgtactggtgttaaagcatcaatacggatgctcgcagcttggcgacgatcatgaaaatacgaagcagattctgctgaatgccattcgccatccaaatgccggcggcgtcttggtgttagggcttggctgtgaaaacaatgagctggcaagaatgaaggaagcactgcaagatgtgaacttgaagcgggtgaagtttctggaatcccagtcggtgaccgacgaaatggaggcaggcgttgctttgctgaaggaaattcatgaagcggccaaagaagataagagagaagacattccactgtctgaactgaagatcgggctgaaatgcggaggttcggacggtttttccggcataaccgcaaacccgctgcttggacgtttttcagattatctcattgcacagggagggagcacggtgctgacggaagttccggaaatgttcggcgcagaaaccatcctgatgcagcgggctgccaatgaagaagtgtttcataagatagtccaattaatcaatgattttaaacaatattttatcaaacatgatcagccggtgtacgaaaatccttcaccgggcaacaaagcgggcggcatttctacacttgaggataaatcgctgggctgtacgcaaaaagcggggatttctcttgtcacggatgtcttgaaatacggggaagtgctcaagacaagagggctgacgcttttgagcgcgccgggcaatgatttgatcgcctcctccgcattggcggctgccggctgccaaattgtcctctttacaacgggaagaggcacgccgtttggcacctttgtcccgacggtgaaagtagcgacaaacaccgagctgtatgaggcgaagccgcattggattgattttaacgcaggtcttttagcagaggatgatgttcatgaggaatatgtgctgcgtgagtttatccactatatgattgaggtggcaagcggccagcttgtgaaccatgaaaaaaatgatttcagagaacttgccatttttaaatcgggtgtgacgctataataagaaaaggctatccttcaagcggatagccttcttcattaaatcaattttaaaccgctgactaaaataatggacgccataataaattgcagcggacgcggggagaatcgaggcgaaagatggctcccgatcagcacgccgggaattgaaccgaggagcagattagctgccagcatgtaatccacgcttccgaagcttgcgttcaaaatgcctgctgccgtaacaagaagaaaagcatgcgcgatatcggttccgacaatctgtgacgctttcatgttaaataagtaaatcatggcaattgcaaataatgagccagaaccgattgatgttaatccgacgataaacccaaacacaacaccaataagaattgtcagcgccctcttattttcaagcggcatcagctgccagcggttggggcgaagttttctatccaaaaacaaacgaacgatgattgaaatggcaaccagcgttaacacatatcctagagcgtgcttaataatttcttcctgatgctggtgaaaggcggggaacaaatgcaatatgccaatggctagcgaagcactcggaatactgccgatggctaagtattttaccaatttaaagttaatcgttttctgccgccaatgggaggcaacgccaaacagctttgtgatcgagttatatacaagatccgtaccgaccgcgatggaaggattaattccaagcacaattaaaaggggagttaataaggccgctccacccactcccgtcaatccgactaaggctccgacaaacaaacccatcaatatgatgcttacactcatgataaaggcctcctgaaaacccgactatttttatcagattatatatgattaggacgcgttaatcaattaaattttttgaatttttgcacgttagctgcttgaaattttggtatgctcaatatctctattcatttgccctataatgagtgtctggacgaaatcgagaagtactaaaggcgcaaaaaaaagatacctcttaacaggtatcttttttcttgtttacgctacatgcgctgctgatagaaaggaagctcagtgtggcccatttcccgcacatacacgaacaggttgcctttatggtgaatttcatgctccattgcaagctgaagcagcgcgcggcctgtgacttttctgccgaaagcggatgtcagatcaatttctctgtccagctgctcttcagtcagctgttcaaggatagcggccgttttttctgtatatgtttttgccagaacattgagatctgtttctgtttcctcctgcttgttttgaaatggtgaggcattgccttccttaatgacatttgcgaacaagtggaaagacgtaagaatgtgtttgaccagttcttctgctgacattgatgtttctgccggtttgtagctgtaatggtctttgctgattttttcggcaagctcattggtcacgtttcgatgggataaaaaatggctgacaatttgattggattggctcattatgatctcctccatatgtaaaaataaatggtgcaatgaaatcctatatcaacggttatgaattcacaagtaatatgctgtgggatgaaacaaaatgctatgtcaatcgtatatataacgttcacaaaacatgaaatggagtataaacatgactaacatacctttcatttatcagtacgaagaaaaagagaatgaaagagctgcggcgggctacggcactttcggttaccttatcacacggattgaagaaacgctttatgatcaatacggtgtattctatgagctctatgccagtgatgatccaaatacggaatactgggagcttcttgtagaagatgtccgcagcggttcattggagcctgagcatgtggcatatatatttgaaaagcttgaaaagaaaacctttgcttacgatgaagatgagaaagaaccggattataccgtccataagtctataagaaacagtgtatacgcgtatcctgaaaagggagttgcttttgccagaattccatattttcaagatgggagcattatgagttttgattgtctgtttgcggttaacgatgaaaagatgcgtgcatttctggagggagtcagaccgcgtctttgggaaaaaagcaagcggaaagtgaccgtgtttacggatggagatggagggacttcaagagagcaggaagccattgtcagagaggttcagcggagtcaagtcatcatgaatccgctattgaaaaaagagatatacagatcaattgatcagttttttcatagtgataaatcgttttatcaaacatatgacatcccttacaagcgcggcattctgttatatggacctcctggaaacggaaagacgacgttagtgaagtcgatcgcaggcagtatcgatgcacctgttgcttattggcaaattactgaatttacgtcgagcgagacaatagaagaagtctttcaggcagcgagacgcctcgctcctgcagttctggtcatcgaggatatagattcgatgccggaagatgtgcggtccttttttctcaatacgctggacggcgcgacatcaaaagaggggctatttctcatcggtacgacaaactatcccgaagagatcgatccaggtttgatgaatcgtgcagggcgatttgatcgtgcctatgaaatcgggcttccggatgaagagctgcggctggaatatatgaaaatgagaggctttggcatctttttgagtgaaggagaaataaaaaacgccgcaaaacttacagaaggcttttcctttgcacagctgggagaattatatgtatcttcagcccttcaatggcaccaagaagggaatcaccatattgaaaccatggtgaaagacatgacaggagagcaaagaaaaagccagcggggaagctggatggaaagaaacaaagtcggttttcactaaaagaaagcacgggtgtttgaaaaacccgtgcttttttgttgcggttagccgaaattcgacaattgcggttattttgcgttcttctttttcttgcaaatatgataaaatatgacatatctcgggtaattcaaaaaggggggattaattgaggatgaagcagacgattccgtcctcttatgtcgggcttaaaattaatgaatggtatactcatatccggcagttccacgtcgctgaagccgaacgggtcaagctcgaagtagaaagagaaattgaggatatggaagaagaccaagatttgctgctgtattattctttaatggagttcaggcaccgtgtcatgctggattacattaagccttttgaagaggacacgtcgcagctagagttttcagaattgttagaagacatcgaagggaatcagtacaagctgacagggcttctcgaatattactttaacttttttcgaggaatgtatgaatttaagcagaagatgtttgtcagtgccatgatgtattataaacgggcagaaaagaatcttgccctcgtctcggatgatattgagaaagcagagtttgcttttaaaatggctgagattttttacaatttaaaacaaacctatgtttcgatgagctacgccgttcaggcattagaaacataccaaatgtatgaaacgtacaccgtccgcagaatccaatgtgaattcgttattgcaggtaattatgatgatatgcagtatccagaaagagcattgccccacttagaactggctttagatcttgcaaagaaagaaggcaatccccgcttgatcagttctgccctatataatctcggaaactgctatgagaaaatgggtgaactgcaaaaggcagccgaatactttgagaaatctgtttctatttgcaagtcggaaaagttcgataatcttccgcattctatctactctttaacacaagttctgtataaacaaaaaaatgacgccgaagcgcaaaaaaagtatcgtgaaggattggaaatcgcccgtcaatacagtgatgaattatttgtggagctttttcaatttttacatgcgttatacggaaaaaacattgacacagaatcggtctcacacacctttcaatttcttgaagaacatatgctgtatccttatattgaagagctggcgcatgatgctgcccaattctatatagaaaacggacagcccgaaaaagcactttcattttatgagaaaatggtgcacgcacaaaaacaaatccagagaggagattgtttatatgaaatctaaatggatgtcaggtttgttgctcgttgcgatcgggttcagctttactcaggtgatggttcatgcaggtgaaacagcaaacacagaagggaaaacatttcatattgcggcacgcaatcaaacatgatgcataaaaaaagacccttaggggtcttttttatttcttcagcttccattcttttatcgtcagctcagaagatccacttgccaccagcggatccgcatggccgatttccgctgcctcttccagtgaatctgcttcgatgacatacgctccgcctgtggcgtcgctgaatggcccaaacatttttaaacgtttttctgcctgtaaacgatccagaaattcatagtgcccagccacatgctcctgattaaatttctccgttctcattgtcagcattaaatatgtatacatattcagaccctccgtgaacttcagtttaacacatttatccatattacagtgatagatgatatgagcttttcgtcctacgaatgccacctatttatgaaaaaagaaaaggagagatgataggtgagcattccagtaaagaaaaatttggtttctgaggcgaaatacgcgttgaagtgtcctaatgcaatgtccgctgaatacattaccattcacaacacggcaaacgatgcgtcagcggccaatgaaatcagctatatgatcgggaacacaagctcgacaagctttcattttgcagtcgatgatcaagaggtgattcaaggtctgccgcttaaccgaaacgcctggcacacaggtgacggcacaaacggtccgggaaaccgcaaatcaattggcgttgagatttgctacagcaaatcgggaggcccgaagtatgaggcagctgaagccttggcgatttcatttgtagcacagcttttgaaggagcgcggctggggcatcgatcgggtgagaaagcaccaggactggaacggaaagtattgcccgcaccgcattttatcagaggggcgctgggatcaagtgaaggcggcaattgaaaaggaattaaacgggggcgtatcagctaaaaaagctgcagtctcttcttcagcgtctgaatatcatgtgaaaaaaggcgacacattgtcagggattgccgcatcacacggagtcagtgtgaaaacgctgcaaagcatcaatcatattactgacccgaattacattaaagtcggacaagtgatcaaactgcctcagacggcatctgcttctaaaagccatgccgcatcctcatatccgctcccatcaggcgtgatcaaagtgacaagcccgctgacgaaagggacaaaagtaaagcaggtgcagaccgctttagccgctctttatttttatcctgataaaggagcgaaaaatcacggcgttgacggcgtttatggcccgaaaacagcaaatgcagtgaaacgttttcagtctgtcagcggtttaacggctgatgggatttacggtccgaaaacgaaagcgaaaatggaggaaaagctgtaaataaaaagacggaagctgtgaagcttccgtctttttatcttacatacaaactgcggcaagcaccttttgaatatcataaatgctctcatcttttttaaactgctttgagacggcaggaagttctgcgccggaaatccaaattttcagttctgaatcgaggtcaaagcggccggccgtttccacgctgaatctggaaatgcttttgtacggaatcgattgaaattccgttttcttgcctgtgattccctgtttatctacaaggataagccgcttgtcagtaaagacaatcaaatcgcgaaccagcttaaacgcggcttcaacattctcaccctccagcaaaatatgggcaagctcttctttcacagcagccgttgacagtgttgacgcattgccgagtaatccatcaataaaccccatcatatacctcctcttcgtattctatcaaatcatactataaaaaaggttttcattcatggatgagtagagtaaacttgtgctgactggtaaagggggcgttcaaaatggaagatatgtatgacagctttgcagccctttctgcttctgagtcggagtatcggattatttatgaggagaaaaacggaagtgagcttattgtcctcggtcctcacggcggcagaattgagcctggcgtcagtgaactggtgcgggcattttcggatcgatgttccatctatttgtttgagggtctaaagcagcgaaacaaccgttccttgcatctcactagcattcgttttgatgagccgctggctttagaaaaagtgaatgaccaccattacgcattagcgtttcacgggtattatgatccgaaaatcccgcatacattggtcggggggcggatcgtaaaaaagccaagctcatttgtgagcgtctgaatgaagcgggttttagcgccgagctcaccaatgagaaagaccgcctggcaggtgtacacccaaacaatattgtcaatcggacgaaaagagaaatgggactgcaattggaggtaagcacggcacagcgaaatgcgctattccgcaattttgggtgccgtgataaaagctacatacaaaacgatttgtttgatcgatatgtggaagccgtcaagcttggcttttataaataaaactagacgggacctgcacggtcggcctattccttcatacgctggggttgtgcgaaagtgtggggaggaatgattcatgttttatcatataaaagagcttcaatatcaagcaaagccagctcatcctgatccggtttatgcgaaaaaacttcaagaggtgctcggcggccaattcggtgaaattagcgtcatgatgcagtatttgtttcaagggtttaactgcagggcggatactaagtatagagatttgttatatgatgtggggaccgaagagattgggcacgtagaaatgctggcaacgatgatttccagacttctggacaatgcacccgcggatgtacaggaggatgcttataaaagcaatcccgctattgcagcagtcatgtcagggatgaatcctcagcacgcgattgtgtccggattgggggcgatggcatcagatagtgagggctatccgtggaatgcaaaatacattatctcaagcggaaacttgctggccgattttcgcgctaacttaaatgcggaggcccaaggacgccttcaggtgacacggctttatgccatgaccgatgatccaggggtaagagatatgctgtcatttttgattgcaagggatacctatcatcaaaatatgtggtatgcggccattaaagagctggaggaaagagaacgggatattgtcgtcccgacgacgtttccgcgtgagctcgaaaaacaggaagtctcctatgacctgtttaatttttccaggggggatgaaagctcacaaggaagatgggcacatggggaagcctttgacggccggggtgaattcaggtatatcccggctccgattgcgttcgcatctgcgcctcatcttaaaccggcgcccatgtggctgcataatacagttcccccaatgtcgaaatgttaggttctcttctgggctgaggaatatatcctcagcccttatttgatcagatgtttttgccaatatgatataacgctttttcctcagcgacctgcaagtgctgttgatcgccttcctcgtacgcatgtggccgcttgtgagataataaataagcgagccgcttctgaaattgaatacctgctttacgccgttcaaacatgtcaagccttttatcagcaaattcctttgttacccggaataccgccgaaattgtggcgagtgcctggcttctccattgcggcagttccatctgcaacagcataaaggttggcacacagaagtggtacataaattgatttgcctggaattcttgaagctctctgaagagcttgttcatctgaaaatgattgcctgcatgctttaacacgtggcacagctcatggccaaaatcctcccattgctcttcccgtgactttttttggtttaatacgatactatacatgccgtcgtatttcaccatcatgctccccatatcctcaaaatgcacccgaatatccagatcctttgcgattttcagcatgtcaatgtgatgaggggatgtgatgcccagccggccgtataaatttttaacgtattcctccagatgtgataagtaatcgcccaattgaatactccctttcgaacatttgttctatttttagcgagaaagaaaagcccgtataggactggaaagtagcgtagaaatctttcccttttctttaaaaaataaacacttttttctttatatcggtctactttttatatgttttagagaacagagaacgatttatttatttttcggtttgcggtttttctctttttcttttaaatagttgataaattcgatggcctgctgtttgctttctggggaaaaatcctgcatatcgcggtatgcaagctgcaggtccggatctgagaacatatcgtcatcggattttttgtctttccccgttaataagtaatcagtcgttacttgaaagtaatcagccagcttttggagtgtgtcgtaatcaggttcgcttcgcccattttcatagtgggaatatcgtgcccgtgacacaccgatgtgtgatgcgatctcttcctgtgtccttttccctctgagactcttcaatctgccgcctatcatactatgacctctcttttttaaactccctacgttacttatgattatagatacaaaatgtatcaaaataaagttatgataaaaaaagtatcaaaaataacttgatgatacagattgtatcgtttatacttggtaacatccgatacaaaatgtatcaaaaaagatcaggagagtgatcacatgtatccgatccaaatcgtttttagtgaaaatcccatagatcagcgccatctcggacaatccggcggcaccatttcgtttaccgcatgcggccttccggtgtttcactttgaaacgcaggaacagtttcaagcatacatgatgttaaaaggagaagcggcgtacaatgaaaaacgataaaagctatccttttccgacgtattcagggttattgaattcagaacattatgacaaaattggcccggcgttatggctgtttctctggtttatcagctcaacaacaaaagaaatcgaaaaagacggcgtaagctggggcatcgtactcggccataagccgttaaaagcgagagaaatggcggcagtcttcggcgtaagtgaaaaaaccgtcagaagatggctggagcttctcgaaaaccatgattacataaaggccgtccgtgcgccatacggactgatgatttcggtcaagcattccaaaaaattcagcttcagatcggacaatactgtacacgggagtctaaaagaacggccattttcgccgcagacaccggacacaaacgaccgtacagatatagataaaacaaacaaatatactgctgctgatgatgcagtggatcacattgcgaagcggtttacacaattacggtcggctcaagaaggacgcaccgtgtatccttcctcaagagattatcaagccatcgcccgcattgttgccattggcgttcctgtcacgcaaacaatcaaatggcttgaagaatgctttcaggcttttgaaaaccggcggaccgccgcttctgaaacaatcaaggcttttcgctactgctcgaaattcattgaagatcgatttttcgcgcagcaagccaaaaagaatgccgcaattcagcatgagaggatgaaaaaacatgacaaaacgaacaatcgaacagattttggacgagctgagaagagggagacgtccattactggcggacaaaccggccgaatcagacgcaagcaggtatgattgcctgcgctgcaaggatcagggaggttatctcgtcagacagaatggcctggaagtctggacgatgtgcagctgcatggcagaacgaaaagtgaagcggctgctgggtgcaagtgagattacccacgctttcagacagctcggcttcaaggaattccgcacggagggaaagccgcaggccataaaagacgcattggagtgtacaaaagagtatgttgccgattatgaacaaatcaaggattgccgaaaaaacagcattgcccttttaggacagcccggatcagggaaaacacaccttttgaccgccgcagccaacgaattaatgagaacatgctatgtgcctgtcatttattttccgttcgtggaaggctttactgatctgaaaaatgattttgccctattagaagcgaagctgaaccggatgaagcaggcggatgtgctgttcattgatgatctgtttaaaccggttaacggcaaaccccgcgctacagattggcaattagagcaaatgtattcggtactcaattatcgttacttaaatcataaaccgattttgctttcaagcgagctgacaattgaagcacttgtacgggtcgatgaagcgctcggcacgagaatctatgagatgtgcagtgactatttagtgattatcaaaggagcagcctacgagcttaaccatagattggagggcgtcagataatgtgcaagctttgtcaaacaaagaaagtcattgtggaacataccggtattggggtcgtttttcatccatgtccgaactgtcggtccggtactgacttaacgcctgtcattcaaaagctggagcaaatgctgacagcgggaaaagcgaggctgaatatctatgattaaacagctgactgcactaatcgctttgctgtttcgggcaaagcgaacagaaaaaaacattgaacaatggtataaggacgacgggaagtgaaagtgttggaaaaaacaaaacagacagagaaaagccctgcgccgtggcgtgctgtcccgtgcggggatacgaaaccgatctatatttattcagcttacagtgaagaagaaaaagaaagattcccatattcaaacggacggctgattgccgctgtatttgaccttagctcttattcgcaaaaaagcaatgccgctttgatggccgctgcgcctgaattgctggaagcgtctaaagcagcgcttgattttctgaaagggaattctgttcattcaaaggagcgcatcattcagctattagaaaaagctgaagcaagcgctgcaccgaaaaggggaggaaataaaacatgattcatcctaaaaaactgctgcatatcgattccgtcacgcttaagagccagctggaggacgggaaaatccgtgtcattattgtggatggcatcaagcaagaagcatggatcacagaagcgcccgagcatggaaaaacgctcgtcgaaacaagaaagggcgaccttgcccgagtggaatttgaaatcggctacaaattaaattaaagcgaaaacagaatacgtccaagacggaaagcctgcggacactgatcaactgcacagcatttgtgcgttgattggtgtccgttttttatttgccaaaaatgaggaggatcatagaatgcaagacttactatttgaatataaacgaacgctcaaacaaacaagaaaccaatataaaccgctcgctgaggcagatgaatccgtgctctcagctgaagagctgaaggataaaaaaatcatcagaaatatgattactgatcttgaatatgtaacagaatggcttgaaaaaggaaggcagcccggcatcagacgggcgattgaccggcgtgatgcttaccagcggctgatgatcaaggacccgagaatcatcgaatcattttccagcgctatgatgtttgagccggacggacaggtatcagaagaagacagagatagaattcgagaagcattagccctgttaacggacagagaaaaggaaatgtttttgctgcataaggtagaatgtttttcttatgaacggatcgccgatcttctcggcgtaaaaaaatcgacagtgcaaacgacgattaaacgggcgagtttaaagatgcaaagacagcaggaagacatgaatcgatcacttgcctgaaagcttgtcatacgtttgccacctataagtgaatagagcatgacacataagcggctggctgatcagccgcttttatgaataaacaaccatgctggaggtggcggtgatgccgtagcatgaaaacacaacttcgcgaacaagcattagcaatctatcaacaacatcaaggaaagatcacaaatcgggcgatcgcggacacaatcggtgtttccccgaaaacaatcggcatctggaaaaaacaagacaaatggaaagaggccctgttttctgcgtccaaaaacgaacaaaaacagcgccctatagacaacgatgaattaaatgaacgccagcggctgttttgcctgtattacgtcaaaagcttcaatgccacacagtcagcaatcaaagcgggctattctccggacagcgctcatgtgacgggcagccggctcttaaaaaacgaaaaggtcgctgctgaaatcagacgcataaaaaaagaaatggtcaatgaaatgtttattgaagcgatggacgtgctgcaggtttatatcaagatcgcgtttgcggatattacggactatgtgaccttcggaaaaaaagaggtccaggctgtcgggaaatcgggtccgctgtttgatgaagatgataatccgattatgaaggaaatcagctttgtcgatgtcaaagactccgggctcgttgatggcaccattgtaacggaagcaaagcttgggaaagaaggcattgccatcaagcttgcagataaaatgaaggcgcttgagaagctatccttatattttgatttgtttccagatcaatttaaacaaaaaattgaaaatgagaagttgaagcttgccaaacaaaaagcggagaaaacagatgacagccaagagccgattgaaattatgatcaaacgaaaagagggcaagtcatgattgtaaaagaaatcaaccctcatttcgaagattacgtgttcaattgggagcagacgtaccaatttctcgtcggcggctacggctcatccaaaagctatcataccgcattgaaaatcgtgctaaagctgctgaaggaaaaacggacggcccttgtgatccgggaggtgttcgatacccatcgggattcgaccttcgccttgtttcaagaggtgatcgaagagctcggtctcacaaaggctgtggcatctctttcttccccgctgcagctgcgatttcacaatggcagccggatcatgttcaaaggaatggacaatccggcaaaattaaaatcggttcataatatttcattaatatggattgaagagtgctcagaggtgaagtatgaggggttcaaggaattaatcggacgtcttcgccatcctgagctgaagcttcatatgatctgtaccaccaatcccgtcggcacctccaattggacgtacaggcatttttttcgggacgaacgcaataaacggtttgtgctggatgacagcgaactttacgaaaagcggacaattgtgaagggagatacgtattaccatcattccaccgctaacgacaatctttttctcccagaaagctatgtgaaacagcttgacgggctcaaagaatatgatcccgacctgtaccggattgcccgcaaaggaagattcggcgtcaacgggatcagggtgctgccgcagttcgaggtactcccgcatgatcaagtaaaaaaatgtatcgcagccatcagcaagccaatctttcgtacaggtatggattttggattcgaggaatcctataatgccgtcgtccggcttgctgtagatcctgaaaaaaaatacctctacatttattgggagtattatcaaaataaaatgacagatgataggacggctgaggagctgcgtgagtttattgagacacaggaattgatcaaagccgactcggctgagccgaaaagcatccaatatttccgccagcagggctttcggatggttggagccagaaagtttcccggctccaggcttcaatataccaaaaaggtaaaacggttcaaaaaaatcttctgttcggaccgctgtgaaaatgtcatctatgagctcaagacacttacgtatgccaaagataaaaacggagctctgattgaggatgaattcacgattgacccgcatacgctttctgccatttggtatgcgcttgatgattatgaggttgctgatatgaaagagacagcacacaaacgaatccggccgaaccgagaaaggaggaggtcataaatcatgcacaatcaaacagtcagagcaactgtatttaaagccaatgccgaggctcctcagacaaagcaaatctatgaggatgacttttctgagctgtacggagaggacattatcgctccgccctacaatatcatcgagctcaaaaccattgccgaatactcgaccattcttcagcaatgcattgatgcgtacagagtgaatattacaggctttggattcgatgttgagtacacatttgatgtcaacgcaagtgatgtcgatcaggcaaaaaagaaaagagcggaaaaagactgggccagactcgaagccttttataaatgtcttcactttgatgaatcagctgaaatgattttaggctatgccatcgaagacagagaaaaaacaggcaacggatttatggaagtgcttcgcgacggggcgggaaaacctgccggcatcgaatatttagatgtgaaatatatgcgtgtatgcggagcaggcgagcctgtagaggtttcatttgtatatgaagaaaacgggaaaatgaaaaggatcaaaaggcaaaaacgcttccgaaaatatgtgcagatgatcaatggaaagaaagtattttttaaagaatacggcgatccgcgaaaaatggatattcgcacaggtgaatatgtaaacacattggcagagaagtatcaagcaaatgaagccattcacctcaaaatcggaagcggcgtatacggtgtaccccgctggatcggcaatattgtcaatttatacggggcccgaaaagcagaagagctcaattttatgtattttaagcaggggcgtcacgtccccgctgcgattacagtggaaaacgggatgctgtctgaagcttcttaccgggagctgcaggaatacatgaatgatcttgaaggcgtggagaacgcccataaatttctcctgatcgaagcggaaggaatcgcaaaagaaaaggatctccacggaggcgaggatattacgccggtttccgtggaaatcaaatccttggcggaaattctccaaaacgacgccctgtttcttgaatacgatgaaaaaagcagaaataagctgcgttccgcgttccgcctcccgccgctgtatacaggcgaggcccaggaatacaaccgggcgacagctgatactgctagaaaaattacggaggagcaggtttttcagccggagcgaaaaacgctcgtgaataaactgaacacgctgcttttgccggagctgaatatccatgacgtcaggctgacattaaaaggaccggactttcgtgatccgcttgagattgcgaaggtgctcggtccttttattacagccggagcagtctcaccgaatgatttacgtgaccttgccggacgggtgcttggaaaaacactggaggagtggccggaggacatttataaacggcctgcaggacaggatgcggaaaagacaaacctgactgcgctcatgcaggagttgaaagaaagcatcgaagatatcaaaacgtcctgaagggaggtgaatcaagcaggtggcgcgagaattaagaaatgccaaaatcagctttgtcagttatgtggacaaggcggctaaccagacagaatttttctttacgaagtcagccaaacctccgtcatttgaaaaaaaggttcggctgtttacaaaaagtgagcaggatgaacaaaagctcgtgtacggaatcgtgtatgagcctgatgttcctgatgcccacggcgattttatgaccgccgaggaaattgaaaaagcggcgcacggttttctcgcggaggcacgggagattgatatcaatcacagcttcgagggcggaaccggcgtcgtggtcgagtcctatgtggcgcccgatgattttatgatcgggtcaaagcggattacaaagggctcatgggtgctcgtgacaagagcgtcagacgaggtgtgggaacagatcaaggctggaatcatcaccggctacagcatggcgggcactgcagatgtatatgaggaagaaccggttgaaaaagcgggattcttcagtgtattcaagcaaatgcttgctgacaaaacagggaaggagactgaagaaatgagaaaagaagacatgaaagaatcattcgagcatgcgctttaccctctgctcaaacggcttgagcggattgaaaaaaacacagacacggaggaaaagccggagcagacgggtgatgacgagcgtctgaaaaagctcgttgaagacatgcttgccccgctgatcgaacgcatcgaggctttggaaaaagcgcgaggcgcgtctaagcagacagcggacgatacgggcggcaatacagagcaagtcaaaaaatcaatctggagcggactgctgtaaaaccagtcaaggaggaggaaatcaattgagaaatcaagagatcattcggaaagcggaaatgtcgctttctgctttaaaaagcggcgggcttatgaaccctgcgcaagcatcggcttttatccgcatggtgcaaaacacgccgaccattttcagtgaatcccgcgtgattcaaatggaaaatgactcgcaaaaatttgagaaaatcggcttcggccagcgtattctgcgggctgcgcaagaaggaaaagcactgtcaaacgacgagctgacagttccaacgacaagcactgtccagctgaacacgaaggaagtcattgcggaaatcaacattacgtatgacacacttgaaaacaatattgaaaaagacggcctgcagcagacgatcatgcaaattttagcagagcgcgcagcagttgatattgaagagctgatcgttaacggcgatacagcatcagctgatccgtatctggcacagctggacggcatccgcaaacaggcggtttcccatatcgttgacatgaacggtgaagaactgtccagagcgacatttaagaaaggcttaaaggcagttccgccaaaatatttgcgcatccctcaggaattcagattctatacgtctcacggcttagaagttgaatggaaggaccgcgtggcagaccgccagacaaaccttggggaccaggctgttcagggcggcttgtcaacagcattcggcgtaccggtcaaaggagtatccaatattcagccgtacacagtcggtgagggagacgcgcaatatgacgcttctgatatcattctcacacatccgaaaaatatcattctcggcttctcccgcaatatccgaattgaagtcgacaaagacatccgctcccgtaaatttattattgtcttaacggccaagctggacagcaagttcgaggaagaggatgcctgcgcaaaattaattaacgtaaaagaataatagaaacgaggtggtcagctcatgctcattgaaccgactgacgtagcctcctattcggtctatgatcgggtgaaaaacaggccggaagagctgctggcgcaggatatcatcgaggcggaagcagaagcggctctcatcacgggccaccgctttgaagacagcttgtatgatccgctgcccggcaaggtgaagttggctttagtaaagcttgcccagtattttgcgcttgtcaacagcgatgaatctgcctcatcaagctatcagtctgagaaaatgggggattattcctacacggtttccggagaaggcggcattcagcggccagaggtatatcatttgctcgaggagtttatcacgccgggctacgcccctgaatcctccagactgaaggtgaggtctttatgagctacaggcagatgctcattcatcgctgcgacatttatcatgaagcagcgcaagcgccgtctgcaggccgatttgggattccggcagacaggctgcagccggtgatttcatatccggatacacccgatgaacaagatgtcccttgttattttaccgaaaaaacgcagcagctgattcaggaggagccggatcaaactgtatatcatagctttctcgtccattttccgttgtcagcggacatccgcgtgaacgataaaatcatttgggagaatcataaatatatactaaagctgccgaaaaggatcagacatcatcattgggaggtcgtcgcagtcagggatgaaagcctatgaaaatagcgggattgaaacagctgaacacggcattaaaagaagcggcttcaggcggtttttccagacaggcgtcccggtggcttgaggagtgcgggcaagattttctggagatcgtcaaatctgaactcatcagcacacaaacgattgatacagaaaaactgctcagttcctttgagaaaggcgcagaggacaatctctggattgtgcaaagcggcgggctttcgcttgaggtggggacacagcttgattacgcctcatttcttaatgacggccattggacgtcaaaacaagatgtgagatgggtgccggggcgttttcaaggctcacggtttatttatgatccagccgcttcaacgggaatggcgctcaagagaaaatggataccgggcacgggctactgggatcatgcactgcttttatatgaacagctgtttgaaaaatcgctggaaagcaaactgcgccagtggctgaagaagctgtaaaggaggagcaggatgaacagtgaaacaggatcgatcatggcgtttttgtacagccggtggtctgttcccatttatgaacgcgagcttcctgatcactttcaggtgccgtcgttatacgtcccgccaccatctgttttcgaggaaacagatacggtctccacatttaaaaaaacctacagtctcaatgtaaaactgtttcatctggactccgttcaggcgctggatgaagcggacaggctcgcggatgccatcagagaagcgagaaatatgattccgctgctgagtgaatccggcgagaagacgggggatatggttcgcatctcccaaatcgagacaagggtaggggacaggggcgaggcggccatggtgatcaggtggagcagccgatattattatcacaaaacagaacagcctgtcttacaggatatcgacatgaacagcggggtgaaataaacggtgtcaaaggacaaacaacagaagaaggctgtacatacaaagagccgggaagctctatttgatacagcggatttgattaagcacgcgaaggaactgttcggcgttaagccggatattcttcagggggctttatttggcgtggatcaaccacgtatgacgaaatcagaagccaaccaattgattcaaacatttctaaccaaggaggtcatgtcatcatgaatggcggaacatttacaacaggcaaagaaaaagaacgtgcaggtatttattttaactttaaaacgacggcacaggagcgggtatcactcagtgaacggggaacagtcgcacttccggtcgcatcaagctggggcgaagcgaaaacgttcgtctccatttccagcgttgaagacctaaacaaaaaagtgggcctcagcattgatgacccgtctttattgctgctgcgtgaagcgaagaaaaatgcgaaaacggtattgatgtaccgtctaaccgaaggtgtccgagcgtctgctgatattgctgaaggcgtcaaagcaactgcagtatatggcggaacaaaaggaaatgacattatcatccgcatcaatcaaaatgtgctggatgctaattctttcgatgtgacaacatatatggacgaatcagaggttgataaacagactgtcaaaaaggctgaagaattaacagctaacggctatgtcacttttaccggaacaggcgatctttcttcaacgattcctctcactggatcagaaggagacactgcagctgagacgctgaatgcatccgcgggaatccgtttatctggcggtacggataaagcccctgtcaactccgactatacagatttcttagccgcggctgaaacggagagctttgatgtgattgcgctgcctgttgcagaaggtgaccagttgaaggcgacgtttgctgctttcattaaacgcctgcgcgacggccaaggacaaaaagtgcaaggcgtcacagccaattatgccggtgattatgaaggcatcatcaacgtaaccgagggtgtgctgcttgaagatggcacggaagttacaccggacaaagcaacagcttgggtagctggagcgagtgcaggagcaacctttaaccaatcactcacatttgtagagtacgaaggcgccgttgatgtgttacaccgccttgaccacgatacgattgttgaacgtctgggcaaaggtgaatttttattcacattcgacgcccgtgacaaatccgtcagcgtagaaaaggacattaactcactcgtgacgttcacagctgagaaaaacaagaaatttgcgaagaacaaaatcgttcgtgtcctggatgctgtgaataatgatttaacacgcgagctgaaagccttaattaaatcaagaaaaggcagcggaagcgatatcccggcatctgaagacggactgcagtatgtaaaaacgatgatcacgcaatacatgacaacacttcaggatgcaggcggcatcactggctttgattccgatgaagatatcacaatttcaatgaatgaagatcgtgacggcttcttgattgacctggctgtacagcctgtcgacgcagcagaaaaattctactttaatgtggaggtaaactaatatggcattaaaagcacaaaacacaatctcaggaaaagaaggccgcttatttctcgatggtgaggaaatggcgcacatcaaaacatttgaagcaaacgttgagaaaaacaaatccgaagtcaacattatgggccgccgcatgacaggccataaaacaacaggggcaaatggaacagggaccgcaacgttctacaaagtcacatcaaaattcgtgctattgatgatggactatgtcaaaaaaggcagcgacccttatttcacgctccaagctgtgctggatgatcaatcctcaggccggggcacagagcgagttacgctgtacgacgtcaactttgactctgccaaaatcgcaagccttgatgtcgattcagaagcgttagaggaagaagttccatttacattcgaagacttcgacgtccctgaaaagctatctgacacgttttaatcaaagctgaatcagcccatacgtagacctttctcagaaaggtctgttttttaaagatgaaaccaaacaatagacaagggagttttttacatgagcgagaagaacgaaaacgtatatgatctttccttttttatgccgggaaaaacaattgaagctgaggaaatcaaagtgccgatctcaaagcgttttgttgataaaaaagggaatgtcattccgtttattttaaaaccaattactactgaacggattgatgaattagagaaagaaaacaccacatttaaaaatgtgaaaggccgcggccgcgtcaaagatttagactcccagcgcttttatgcgagaattgccatcgaatctactatttatcctgattttcgttcaaaagatttaagggaagcatacaaaactgcggatccggtagaagttgccaaacgtgtattatctgttgggggagagtatgcgaactggctgaataaagcaattgaaatcaatggttttgaagatgatcttgaagatctagaagaagaagcaaaaaactagtaaaggatggcgataaggaagctgtgtatttgtactatgcaatgcatgagcttcattactcgccatcccaacttcttgaattatatgaagcaccaaaacattttaaagctcttttatttgggttgataggttataagctagatctattagaaaaagaatcaaggagaggagggaactaatatcgcaaaattaacagcccgttttgatctcgaagacaaggtatctaaaaaactaaaacggatacataaaggattccaagaggtcgaaaaaaaagtcaaaaccattaatcggcaaatcaaaatcagtatcagagcggaagatcaggcattttaccggctgagaaaaataaacgactatatcattttgaaattcgcgaaatcgcttgagattaaagttgtacttgatgaccaagtcacatcaaagcttgatgcaattgaaagaaaacttaaacggctgccgaaagaaacgaagctgactgtctctttggtagatcggacagcagctgcgtataaaaaaataaagaagatgctttctaatcaaaagctatcattccttttgattccagatgacaaggttacttctacagttaaaaggattatcggttatattaagaaaaatttgaaaaacggatacacagtaaaactaaaggtcatcgatgaaatcaccaaaacagttaatcgattaacagcccttctaaggaaatttgaaaaaacctattatgtaaaagtggttgttaagacaaaaatatcagacaaaatcaataaaaaagaaagcccgattaacaaagaaacttctaagaaagaatcagacaaatcctcagataaaggctctgataaaaactcagatcaaaaacctggatgggtcggaaaaataaaaggctggctgaaggattggtggacaaaatcagcttggccttggatcaaagatacgctcaatgaaataggcaaagcttttttggatcgtttcaaagagagattgatagaaaagctgaaaaatgatgtgtttgataagatcattgataaaattctaggaccacaaaaaaaggacgattctggtgaaaattctgacacagataaaaaagtccttaaccgtaatacaggaggaaattgttgctgtgactgctgtgaaggcggtatcagcccgggcactaaaaataaaaaaacctatagaaaaaagaaaagtcccacaaaggctccaaacagaacactcaaggttcctggagaggtgataagaagacgtcaaagcggcacacctgctgaaagtgcacctaggacctcgggttccaagttaaagaactggcttggaggcttaaaatcgctagggaaggattcatccaaactaggtaaagcgttcagaggaatgggaaaggctgttccatacgtaggatctgctttagcagtgtttgatttagctggaatcaataaagataatgctggcgaaaaggttggttcaatcggaggacgcattgccggagcggaagctggtgcaacagccggagcggaagctggtgcaacgattggatctttcgttggtccggaaggtacagcaatcggcggggcaatcggcggaattggcggcgggttagtaggcggaatcggcggcgaagaagcaggtaagaacattggtaagatgtttgatacttctaagttaaaggagagcataagcaattcactatttaacaaagagtggtggagtggaaaatggaactccatttctgatactgccaatggggctattacttggattgaagatacatggagtaaagtttcaacttggtttgaccagtatgtgtttacacctatatataatgttgctgtacctgtaattaattttatagtaggattgtttgcctatgcatgggatggcatattggcagtatggaacattgtctacccgtggtttaaggataacgtgtgggatccaataagcggagcagttactaatgttgctacaacgatatggactggattgtgcaacgcctggacggttatttcaggcatatggtctactgtttcaacatggtttatggacaatgtgtggaatcctgtaagtgaagccgtaaccactgcggcaacatggatttggagtaagatcaatgatgcatggacaataatttccaatatttggacaggagtatcgaattggttttatgataatgtatggaacccgatcgtcaaaaaagtagaagatattaaaacttcaataaaagaaaaattcgatgatgcaaggaaattttttgaggatgcatgggatggaattgaaacttggtttaatgaacatgtgaaagatccattggttaaagtatcagagaaaattgctgagaaatttcaatggctattcgatttaaaagattcagttggtggtttcgttgcaaaagtaatacacaggggggaagaagttactcacctcaagaaaaaaccaatcaaaaaggattcgaaagagaaaaaaactagttccaaaccaactactaataacatttttgctcaatctccatcaaataataatatgactgtttttcaacaagcactagatcagaacgccacaggcggctacatcaccaaaccaaccatctcgtggatcggtgaagccggcaaggaattcgttatcccggttgataacaaccgaggccgggggaagatgcttctttcacaagcggcgtctaagctgggtatgcaagttgtagacgacatgggcgcagcttcgtcttctggcggaagtccagcatctgtttcaggaggagcagctgtcagtcctctatcaggcacagcctccccagtaatgaacactgcaaatcttacaggccaagcgtccacactcggacagcaattttcagaaggctttggtaaaggcatcagcgatcagccggtcaaaatggaagactggaaaaagaaaaacatcaatacgccatttacacaaatgatttctgcttcaccaaattacggtaaacaaatggtaagtgggtatgccaagggccaaagcggcactgcaaccggaacagacggctttttgcaatcaaaagttaaaacgccgttccaagccactgtgagcaaatcgtcttcatggggcacaggaacggtcaaaggctttgcgcaaggacaaaattcaacccaaacagggactgcacagtatgtgagtacacatgttgacaaaccgttcctgcgttcaaaagacacatcgaacagctggggctccggtttgattggaaactttgtgacaggcatgaattctaaatccagtgaagtaaaacaagcagcaaaggatatggccaagagagtggagcaggctttccgtgaagaattagatatccattcaccttctcgtgtcatgatgagcttagggcgttttgcctccgttggtgttgtaaaaggtctggattctgtcgatgtgaaaaaatatgctgaaaagcaagctggatcactggcagctgcttattccggaatgggtgcagtaggtggaaatgtgaagcagtggcttatggctgcaatgatggccacaaaaacaccattaagctggcttccgggattgatgacaattgcaaagtttgaatcaggaggcaaccctaacgccattaacctgtgggatagtaacgcgaaggcaggcaatccatcccaagggctcatgcagacagtaccaaccacttttaacgcacacaaagcgccaggcatgggtaacattagaaacccgattcataacgctgctgccgcaatcggctacatcaaaagcagatacggctctattgacaatgtacctggtattaaaagcatgaagcatggcggaccttatgtcggttacgcaaacggcgggctgattacaaaagaacaaattgcacgtgtcggtgaaggaaacaagcgggaatggatcatcccagaggaacgtggcatccgaggccgctacctccttcagagagctgcgcaagctctgggaatggaagtgacagatccgtctcaatcccagcagtctgagctttcttcaggacaagtttcagcagttacatccggtacacggcaaacgatacaaacagccggaacgaaagaaataaagattgagtttaacggagaccagcatttccataatggacaagacgccgaaagccttgcagcgaaaatcaagcaggcgcttatagatgaattgcaaaaggatatcaatattggaacgaagggagtcgttgcatttgactaaatccgtatatgaattttggatttcacaagggaaggacaagttgcggctccccgttcttcccgaccagctgaatatttcaaatacgattcagaatgagacggttaaagtagccaagttcggtgaccttacatttattgacgaacaaggagcgaaagaaatttcgttctcttcgttttttccgaagaaatacagcccaatagctgaatatcaaaccttcccgtcgccggaaaatgcgataacaaaaattgaaaaatggatgaaggccaaaaaaccggttcagtttttgattacgggaactaaagtgaatttaacatgcagtattgaaggtttttcctatagcgaaggccagcaggatataggtgatcgttcctttgatattcaattaaaagaatacaaaaccgcttccccgcggaaaatcaagcagaagaaaaaaacaaaggcaaaacgtccgtcgaaggctgcgccgaagacgtacacagtgaaaaagggagacacgctatgggacattgcaggcagattttacgggaacagcacccaatggcgcaaaatttggaacgccaataaaacagcaatgatcaaacgaagcaaacggaacatcaggcagccgggccactggatttttcccggccaaaaattaaagataccgcaatgaaacaggtgatgtatgatgatagaactgttcgtcattaaagacacagagtggcttgagctggttgcagaaagcgtatcgcttgaaggccatcgttatcaggcgccgcgttctattgaagcaaccatcgtcaccaagcagggcgaccagacgtattacagtgtctcagaaggagatacggtcttgtttaaatggaagggaaaagagctgtttcggggcattgtttttgcaagaaccccggacgagcatacgcttgccttcagcgcttatgacatgcttcagtacctggtcaaaaaccaggatatgtacgtgttttccaatcagcgggccgaccagatcataagaaggattgcgagtgacttccagataccgacaacctcgatcgcaaacacaggccatacgatcaaaagtcttgtcattaaaaatgatacgacattgtatgacatcatattaaaagcgctgaaacagacgaaaagccagacaggacgacattaccagctgtattcggaaaaaggaaagctcggtctgcgcgcttggccagatccgtcagaagtatgggtgcttgaaacgggcgtcaatatcacgggctaccaatacagcacttctataaacgatactgctactcgggtggtgcttcgccggcagaaggacaataagacatataaagcctctgccaaggacagttcaggcttaaataaatacggtgtgcttcaatatacggaaacggtcacagatgacatcaaccaggcacagcttcagcagcgggcagatgtacgccttgctgaaaaaaagggcgtgaaaaaagaactgaaaaatattcaggcagtgggcattccggaagtgcagagcggcttgcccgtctatatttcgattccagaggccggcatcaagaaaacctattgggtagatacggaccggcatgaatttaaaggaacgaaacatacgatgacgatcgatgttgtcgaaaagaatacgatgccggaaggagtatcctgatgagattaagtgaggctataaaacatttggcagtcggcgcaattgacgctgagtctccggtagaactgctcccggctgaagtcgtttcggtttctcctgtggaaatcaaattaaaagaaaacagcaaactgatcataccggaagacgccatcattatcccaaaacgaatgcagtccggaggagacgatgcactcgaaccgggggatcgcctcatgaccgcggctctgactggcgggcaatcgttttttattttagataaggtatagacaaaccgcttcagtacgaaggggtttttatttagcatgtaaaaggagtgggcatcatggccctgacaccagaagtggagtttgaagatattgaagatgtgagtgaaatcattgaaacctcgcaaacgtacaaaatagattttgaaaacggaagaattacgaatgagctgattaccgggcttgaagcgatcaggcagttcgtgtatatcgccttacagacagaacgctatgcgtattccatatacagccataatgtcggaaacgagcttcaggacgtgctgaccgatcatgagacaactgatgcctataaaaagatggagatcccgaggctgatagaagaggcgctggtttatgatgaccggatatcggctgtaacagattttgagattgaaaaacaaggcgacgcgtttcatgtgtccttcgtggtggagacggatgaaggaacgcttgagattgaggaggtgattggcgaagatgtttgaagatcagacttttgaagcgattatggagcgtatgctgaacagcatttccgcagatattgacacaagagaaggcagcgtcatttataatgcgttagccccggcggcggccgagcttgcgaagtcttatatatggctggatactgtgcttgagctagttttttctgataccgcacaaggcgaatttttagacaggcgtgcagcggaagcgggaattgaaagaactgccgcgacaaaggctgtcagagcgggagagtttacatctggagttactattcctgtcggctcccgcttttacgtggataatctttattttcaatatacggcagacgggacgctcatctgtgaaacacctggtgaagcaggaaacgccaacctgaccggacgcaatttactgtcattggataccattcccggtttagaaacggccattgtcaaagaaatcctgattccggggcgcgaagaagagggagatgacagcttgcgagaacggtattttacaagggttcggcgtgaggccgtcagtgccaataaaatgcattataaagagtgggctgaggaagtggacggtgtgggaaaggcaaagatcttcccgctttggaacggtgaaggcacggtcaaaattgtcgtcaccaatgcgaatcttgagcccgcttctcctattttaattcaaaaagtgaaagattatatcgaccctgaaccaggacagggagagggacaggcgccaatcggagccgttgtcacagtggagagcgcggtctggaaagaagttgagatttctgccgaagtgctgcctgagatcaatcactcaattgatgaagtgaagtcagaaattgaggaaggcgttttaaatctctttaagaaaatggcgtttgaagataacgtcatccgcctttctcaaattaacaatatcgtctataattcaccatcagtcagtgactactccaatattcaaatcaacggcacgtctgaaaatctggtgttgagcgacgtggaaattcctaagcttgggcaggtgaagatcattgagcaaacaagatgacatgcgagcttatctgccgccgtttctcaccagccttaaagaaatggctgagctgctgaaagcggaagcgcctgagtttgataaacaaaatgacagcatatttgatctgacggatcagttattcgtgccgacggcgacatgggggctcagccgctgggaaaagattttaaacgtaccgcgggaatcaggtgacactgatgagatcagacgattgaggctcatttccaaaatgtcgaacatcccgccaatcacatacagggccattgagcaggcggtaaaccgtttcttgaaaaacccgtctgcacaggtccgcctgattcccggcgaataccgatttaacgtcgatatcaatgttgatgacctccagcacatgaatgagctgatcgaagcgatagaaaacatgaagcccgctcatttggcgtatacgctcagaggcggattgaacgagacgctgcaaatcaaagacacagttatcctgaatcatcgcagataccgaacagccagtgagctcaaggtcggttattctgtcactcttaacaataatgaggtggtcttaacttgatttcaaccatatacagagaacgcacagcggctgatctaaaaagcagaatcgatcacgtgctgctcaacggccaaaaaacagaaatagtagatctcaccattgacggtgcgaccgtcaccattctgacaaaacgtgaggaagacatcaagcatatcgaaacggtacaaatttttgacgagctgggcaatgtgatcacagagagaaagactgacctggacgtcagcgaaaacagaacacttgatttcagatttacttttgaggtggtgtaaacatggcatacgaagaaaaaacagactggcttccggacgaccccatcaacgaagatgacgtcaaccgctgggaaaaaggaataaaagacgcccacaccgacctggccgcccacaaaaacgacatgaacaacccccacaacacaacgaaggcgcaaatcgggctggggaatgtggataatgtgcagcaggcggcgaagaaggattttgacaagcatgtgaatgacggtacgattcacattactgctgctgaaaggtcaaagtggaacaacgctcagttaagtaagatatcaggtgatgatggaagggtcttttacaagagtgtgaccgaaattactgattataatgatttaaccgatactggtatgtacttaatatacaatgacggcttgaagggtccgggcctaaatcagtgttttctccttgtgatgagctataaaaacacacttgttcaaatagcttatgacggaattaagggagagcagtcattttttagaataagaaaaaacgattctacaacatggacaccatggattgaatcagaaactacagaggggtctcaaaagaaaatagatgcacatgctaataaaacagatatccacgtaacaaaatcagataaagacaagtggaacgactcacagctctttaaaataactcaggataacggtctcgcaaagtactgtgaagatgcagatttcaatactgtcatcgaaactggattctattacatgagtggtgcgacaacaacattaaatgctcctgttaataacaatggttatttaatggtttataatttcagcacgtatgcatatcaagaatacacgtcttatagcagtagtgacacaatatcaactggccgaaggaaattcatgaggaataaagtggctaactcagacgtttggacatcttggcgtgagatcgaatcggttgaaggctcacagatcaaagtagatgcacatgccaataaaacagatatccacgtaacaacatccgataaggacaaatggaataatgcacaactatatagattaacagatactcaaggttgccgaactaaaatcccagatgggactgacttgttaacactaccctctggcttttactatgcattagggaacgtcataacaaataatcctgtttcaggagatggatcatggtataactatgatgttatcgaaacagagggaggcggacgaaaaacaattttggcctctagaagttatgacggaaccttttggacggcaacgatccatacagacggcgtgtttaaaggctggaataagatcgagactgaggtaagtgctcaaaccaaagcagataaagcgctagctgatgctaaaaactatgttgactctaattatacgaataataaattaacagttcttacaggctctaatgcaatacaagacgcaagaactggggggaatgaatatcctccagggttaacactaatggatattggtcaaggaaatactacaggttatccacttggttatggaattgtaaaaaatgagaaatacagtgattttagatttactcaatatttttacggtacaggaaatgaatcaaatagttatattgatagtactggaacgtgggttcgtcactggtggagtggttccggctggactgcgtggcaaaagatatcagggtttgctcacgctaatattgggactactgggcgtcaagctcttattaaaggagaaaataacaaaattaaatataaccgtattataaaagatagccataaattgtttgatacaaaaaacaataggtttgtagccagtcatgcaggaatgcatttagtcagtgctagtttatatatagaaaatactgagcgatactccaattttgaattatatgtttatgtaaacggcacaaagtataaattaatgaatcaatttagaatgcctaccccttccaataacagtgataatgagtttaatgcaactgttactggatctgttacagttccgcttgatgcaggagattatgttgaaatttatgtttatgttggttattctggagatgtaacacgatatgttacagattcgaatggagctctcaattattttgatgttctggagcttggcggaagaaattacccgagagtttaggaggtacctttatgatcttatatgatgccattatgtacaagtatccaaacgcagtatcgagaaaggattttgaattgcgtaatgacgggaacggttcatacattgagaaatggaatctccgggcgccgttgccgactcaggcagaactcgaatcctggtgggaggaatcacaaaaaaacccgccgtacgagccgcctgatcaggtggagcttctcgctcaagaattgtcacaagaaaagctggcacgcaagcagcttgaagaactgaacaaaactttgggaagcgagttgtcagatataaagctttccatactttctttgaaaggagattactctgaatgaattattgggtgcttgccctctattatgagtgggcgacaacggatatggtgaaacaggccttagcatatcaagactgttcaattgaggatctggcagagggtgtgaacaaaaagctgatcacagctgaccagtataaagaaattaccggtaaagccatgtagtaaggcttttttattttgcctgtttttagatcaaaggaggatgaagatggtgaagtatcaatatgaatttcctctcgataaggctggaaaagccggcgctgtaaagccctatcgaggaggaaaaaatgattttgtgacacctgtttcgaatttgtcaggcgtagcggagattttaacaaatgcttccttaaaggcgactgaggcatacagtcagctcgggcaggacaggcttggcgcagttctgatttcgaaagtgaagggctgggcgtatgcagatcgtgaaggtacgctctttatagaagaaagcgacaacaacaatgtttggacaacgacagcagcagttaatgtcgcagcaggtgtcctgacagcgacggactgggtatacctttctaaacgctattaccgtttccgctatgtgaacgggaatcttcagcaatctgagtttgtattataccaatcagtcggtgcgggtgagatggatgtgcgtgtcaatggaaaaacgcctttacagattgactttgcggagaatcaaacacacgatggacggctgaaagtcgaggctcgcaaaacatttgactttgtctttcatgaaaatgcagagtccgccggcgagggtgcttctttacctgttgacggtgccgcgcatttactcgttgaagtatatggcacagcggaaatgagcgaagtcaaattttggggcaaatcggtgtcagggcagaaactgccgatcagaggcgtgaaaactgatgatgccacctctgctttgagtacattaggaaaagctgaggcatgggccttcgatattaaagggtttaaggagatcatcatggagatcgtcagtatcaccggcggtactctctcggtaaaagggaccgctgtttcataacagttttggctctcggaagggaggtgatctgcatgtgaaggaggagtgaataatgcagcaagaggcagatgtgaatgtgtttcagcaggatttagcagacatgaaaggcgagcacaaagcacttgagcagagggtttccgcattagaacgcgtgtctgaccgtcaagaccagcaaatcatgacgctgaacgaaaaattaaacaaaattgaagaaaacactacgtggattaaacgcaccatcacaggtgccatcattacagcagtgtctacaggcatcattggcggagccatcgccattatgtacagcctgctgcagcattaaagggggattttcatgaacacgtttgacaagggcacggtcatcaggacggtgcttcttttaattgctttaatcaaccagaccatgctgatgctcggcaaatcaccattggacatacaggaggagcaggtcaatcagctcgctgacgctctttattcagccggttccatcgtatttacaattggaacgacacttatcgcttggtttaaaaacaactacgtaacagaaaaagggaaaaagcagcgcgacgtgttaagggacaataatctgacgaaataaggagagatgaaaatggttaacattatccaagactttattccggttggcgcaaataaccgtccaggctacgcaatgacgccgctttacattacggtgcacaatacagcgaataccgcagtaggagcggatgctgcggcccatgcccgctatttgaaaaatcctgatacgacgacaagctggcattttacagttgatgatacagaaatttatcagcatctgcctttgaatgaaaacggctggcatgcgggagacggaaatggcagcggtaaccgggcttctatcggaattgaaatttgcgaaaatgccgatggcgattttgaaaaagcaacagcaaatgcccagtggctcatcaaaacattaatggctgaacataatatcagtctcgccaatgtcgtccctcataagtattggtcaggaaaggaatgtccgcgaaaattgttagatacgtgggattcgtttaaagcaggaattgggggaggcggcagccaaacttacgtcgtgaaacagggcgacacacttacatccatagcgagagcatttggtgttacagttgctcagctgcaagagtggaacaatatcgaagacccgaatcttattcgcgttggtcaagtattaattgtaagtgctccatcgtccgctgaagaacccgagctctatccgctccctgatggtatcattcaattgacaacaccttatacctcaggagaacacgtctttcaggtgcaacgagcacttgcggctctgtatttttaccctgataaaggcgctgttaacaacgggattgacggcgtttacggaccgaaaacagctgacgcagttgcccgttttcagtctgttaacggtctaactgctgacggtatctatgggcctgcgacgaaagcgaagatcgcagcgcaattaagctgatcacagaccataaaaatcccggagctgctccgggatttattttttcttcttcaactttttaataattccagcactgcgctccctcacccgaagcgagtacccggaaagcccaaaccttccgtaatcaacaaacttcacacgcctcaccaattttttcactgtatcacctgacattatcctctgtttgtatttattatatgtaaccctttaagaaaaggaataaggacaagagctgttttcccttgtccttttagtgtgatcatgctttttttcgtttatactcgtcaatcagccgttcgttttctttgaagattcttgctgtatgcggactgacttgatagcttgcgacactggtggttgaacgttttttcaggattttaaacggcttcgccgctctgggctcgcatctgttttgaaacgcacgttccattatccttcaccttcctcctcaattggcagcaccaaatcatatatgctcgttaatgacgtaaatagcaaataatcaaattccgtgacaatgctgtcagacgtcagcttgatgacatagttctgtgtctcgatggtaaaagggatgagaaccacttttccgtattggtcgtaataaacatcctttcgatcgagccgtgtttgtacatctgccggatcatccatatgctcggttaaccggtctttatcagcctgtgtcgaatagtggcaaagagaagccgttaagttcattttatcagcataggttttcagcagcttatcaataccttcagcataagcatctatacttccataataaacatggatcggctcgtttttcaataggtattggtatgttttcagccgattgagatacatgtggagcatttcgttgttttcttcaagaatttctcttgtgtctgtttcaagctcgctgccggccagttttttgacgtatgcacttaagaagataaaagcatcaatcaaagcaaaactgactgcgacaatgagataccgttcccagtgggtaaatagggaagtgggctcatatgtccagtataccatagcgcctagaacaaacagcaaataccaagttttccggatggcggacattttttctttgaccttcgcttcgaaacgccacgtggcatatacgtataaccccagtccggccacgatgcaccagaccatgatctgaaagaataaaaccatattcgaatccctcacatttgaaataggttctgcttattgtattcgagagatccggatggttttcctgttccatcaaaaaaaccgctcctttgacagaagcggtgtgacattaaaatatcatatttaaaataaagtaggcgatggcaccaagtgtcgctgaaatcggaagcgtgatgacccatgtaatgagcattcgcttggccgtaccccagtttacaccttttacgcggtgggacgcaccgacgccaagaattgatgaagaaatgacgtgggttgtactgaccggcaaatgaataaacgtggcgccgaaaataatggctgctccggttaagtcagcggaaacaccgtttaccggacggattttcatgatctttccgccaacggttttgatgattttccagccgccgattgatgttccgagacccatggctgtcgcgcaggcgaattgtacccaggtaggaatatcattagcagaagtatgtaaattcgctgtgatgagagccattgtgataattcccattgctttttgcgcatcgtttgttccgtgtgtatacgattgcagggcagctgttacaatctgcactctgcggaattgcttattcgttttcgccaagttgctgtctttgaaaatcagcttaacgatgctataaagaataaaaccaaggacaaaggcaataattggtgataggatcagtgcttcaatgattttaatgaagcccttatagtttaacgctgcaaatccggctgccgcaatggctgcaccggcaatagcgccgatgatggcatgggatgagctgcttgggataccgtagtaccatgtgataaggttccaggcaattgcagcgagtagcgcagccaaaatgacaacagagccattttccagcgtataaggatctacgatgtctttcgtaatggttttggcaacacctgtaaacgtcattgctccgacaaagttcatcacagccgccaatataatggcatggcgcggttttaacgcttttgttgataccgaagtcgcaattgcgtttgccgtatcatgaaacccgttgatgaaatcaaacgccagagcacaaatgactattagtatcgttaatattaatagaatatccatttttacccctcgttacgcgtttttcataatgatggtttcaagattattggcaacactttgacaagagtcggcgatttcttcaagcgtttcgtatatttcacgatattgaatgactttgattggatctgtttcatttccgaaaagattctttaatgattttctgtgcaagttgtcacagctgtgctcatactctttaattttgattgcgtgaggctgaatatcctttaagcgattttctgccagcagctcgatcgtaatcaaaatctctttcgcacattctctgatatatccgctgaatttatcaatatgctcgtctgatgaagtaattgagaaaatctccatcatggcagagaaatgttcgattccgtcaagcacatcatccaagctgtttgtcagctgaaggatatcttcgcgctcaataggagtgatgaacgctttgttaagctctttaatcatgacatgaacatgattgtcaccttttgtttcatattcctttaacgtatctgcaaattctttaagagtcgtttggttagtgaccttaaaattcacaaaatattctgcagtttcgtctatgttctttgcaatttctgttaaaaggagtgagaacttatctttttttcttcttatcattaaaaaccctccatagtttgaatgaacaatgcacacatcaaattattatatagccttttgtcgaaaaaaaacaggtaaagtcgaaaaaaacgtatcttgacttttttgataaatcgtgtctccttattttgacctacttcgctttaaaaaaacgacccaagtttgcaaaaactttctgcttaacgtaaaaagtatatcaaaagttgtgtttttcctgtcaacttttatcttctgtttcaccaaaaaacggttccctaaacaagggaaccgttttatcagcttgcttttcgttttttcatcccgtaatagacaggcagcccggcaaggccgatgaggatggataatccgcagctcattgtatctgtaatgagtgtgctgcctagcacaaagaaggagcccgcgattgccagaattggcatagatggataaagcggaacactgtaggcgcgcttttttccctttgctcgcttgcggagaataaacactgcaaaaaaggccatcacataaaaaatgtagatcatgaaaatggagatttctgagagcttatcagggttgctgatcagcatcataatcaaagccaaagcaatttgaaaagaaatcgcaatccatggtgtgcggaacgacgggtgcacatgtgacagtttttcagcaaatggaagctgtttgcgttccgccattgcaaatgaaacacgcgggaaagaaagcacctttccatttaagcacccaaagatgctgacgataatccctacactgatcagctttccgccaattgacccgaacagcatggttgccgcggtgcttgtcgcattttcaccaagcgtgacaatttcgttcgctgacaggatgtggagcaatgcaaaattaatgaaaatatagatcgctgttacaattaataatccgcccgtcatagcgcgtggcagcagcttttcgggatttttcatttctccgccgagagcggcaaggagaatccatccgtcataagcaaacaacgtagctaaaatagccgccccgaagttcatatcggaaatgctttcgtttactgctgtgaagatgtgctgatcgcctttccaaaggccaaagatgatgatgcaggcaatcggaatcagttttccgatcgttgtcagcgtttggacaaaaccgccatattttgtaccaataatattaatgacgcataaaaagagaactgctatgattccaatgacttttgatagtccagatccccagccgaaaagattcgccattaaagatccaaaatataaacccagcgcgccaataatcgccgggccgtaaatgataatctgcacccagccgcacaaaaatccccaaaactcgccgtacacttcttcaaggtacgtataaagaccgccggtttttggaatctgcgttccgatttccgcgattgtcaaaccgcccgccagtgttaaaataccgcctaacagccaggcgaaaagcgctgtttttgaatcacctgaataagcaagcacagcgccgggcttcataaaaacaccagaaccgataatggttccgatgacaagagtaagggcaaacaagaggcctatctcttttttcaaaccgttgtcttcagtatgcatgtccttaacctcctatgatgttgaagcttcatgttgaagaatctattttttcatattgtaaaccctattttagaaaagtgaaataaaataaattttctgattttcgaaatttgctttgtgtacagcaaataaaactgtaaaaacgcttgttttaacaatctataaacgaataaacttcatgatttttatttgcaaagttcgtgttttctgtattaggattttagccggtacggaggggagaattcagaaaatgaacgaaccttcggtgaagctgatatgttgactttctcatgcgaataaaatactttgttattagaacaataaatatacaactatgatatgatatctcgaaatcgagataaaataacctggagggacagcgtatgaaagttaacggcattcaccacgtatcggcattaacggccgacgcacaaaaaaacttggatttctataagaaagtattaggattaaagctcgtcaaaaaatccgtcaatcaggatgaaccgacaatgtaccatctgttctacggagatgaagtggcaaacccgggaactgagctgacgtttttcgagattccccgcattgcaccgtttcatgcgggaacaaacagtatttcttctattggattgcgcgttccaagcacagaagccctgcattactggaaagaacgttttgaagcgcagcaagtaacgcacagcggtatatccaaaagagctggacgtgacatattggcatttcaagatcatgaagggcagcgacttgtgctgactgctgatgaggaaggaaaaggatatggcctgcctgttaaacagagcggcattccggaaaaattttcgtttcgcgggttagggccggttgaactgactgtgccatatgctgaaccaactttacacgtattgacgaatattcttggatttacagaaatcagccgtgaaccagtcgaagggcaaggaaccgccgttattctggaatcaggagaaggcggtgctgcaacggaaatccatttaatagaaagaaacgatcttccgcgcgagcgtcaaggcaaagggagtgttcaccacgtcgcatttcgggtaagagatgaagaagaacttgccgggtggcaccggatcatcagccgcgaaggctttagcaattcaggcatagttgagcgctactatttcaaggcgctgtatttcagagaaccgaacggcattttgttcgagttatcaacagacggaccgggctttatggtagatgaaaatcttgatgagcttggccaaacgatcgctcttccgccatatcttgagcatcgaagagctgaaattgaagcgaaattgaaaccgatccaataaattgtgattcatttgccctccggcgcgccggagggcttttttattttgggaaaacgcatcgccgattacgatttggagaaagggctagaaaccagctgtatataggatgattggcatgaaatggcctcggcaaaaatattgtctttgtttattaatagtttattcatatttgcttgttacactatttccaagttagccaaaaggagtgaaaaacacgtggaaaagaaaaaacgcgagctggatattttcctcatcctcattttgctcgcatctgcattcttaaatatctataacatctggaatgatgatacggtgaatccttattacaccgctgcagtcacaagtatgatgcaaagctttcataattttttctatgcctcattcgacgcggcggggtttataacggttgataaaccgcctattacgttccagatacaaaccatcagcgcacttatattcggtatgcacggctggagcgtcatcctgcctcaggcacttgctggtgtaggttctgtccttttaatgtatctgttaataaaaccgacattcggtaagacagcagcaagaattgcctctttcatcatggcatgtacaccgattgctgtagctgtagcacgtacaaacaatgttgatgcattactggtatttttcttattgcttgctacatggcttctctttaaagcgatcagaaaaggaaagctgatctggctgttagcagcatttttcgttgttggagtaggatttaatacaaaaatgctgcaggcttacatgattttaccggctttcttattgttctatctgattgcggcaaacgccacaatcaagaaaaaaatcgtttcattggtaagtgcgttagccgtattagcagccgtttcgttatcgtggccgctcattgtcgacaatatccctgcaagcaagcggccttatatcggaagcagccaaaccaactctgttttggaattggctttcggctataacggaatccagcggctgacaggccaaaattcaggcggcggccagggtgcgccaaacaaagacgcttcaaaagaaatgtcttcttctgataacactcaagcaccgcctaatcagtcatcaagcaacagctcatcaagcgatggtaaatcctcaaatggcaatatggcggcgcctccatccaatggccaaatgccaagcggcggtcaaggaggccctccaagcggcggagatggcggccaaggcggacccggcggagacggagggaaaggcggtacaggaactggttcgaaaatgcaatcaggttcagggatgtttggaacgggaacacctggtccactgcggcttttccaacaagagttatctgatcaaatcagctggcttctgccatttgcgatatttggaatcgcaggcttactgatcgctggcgcgagagaaagaagaagattatctatagagcagaaggaaacggtgttctgggttgcgtggcttgtaccgattgccggattcttcagtgtcgcagaatttttccatcattattatctcatcatgctggcaccgccgattgcggctcttgtcggtgcggggtgggttgctcttgttcatctgtaccgcaatcagacaggctggaaagcatggcttttgccgggagcaattattgcgacaactggatttgaattgtttattctcagaaactacaacgatcaaatcggtgcaggctggagcatcggtgtaggtattatcggcgcattgtcagcgattgctttgctgctgtttaaacagcgccaaaaaccgttcagttattatgtttcacttgcagctctcctcgcattgctggtgatgccagtttattgggcaagtacgccacttctgtacggaggcaacagctcactgcctgaaacaggccctcagctcgcatcaatgggcggaaaaggcatgggaatgtctgatgcgactgtaaatgaaaaactgatcaaatatctagaggagaataactccggagctgaatacctatttgccacaaccgattcgaacacagcggcaccatatatcattaaaacgaaaaaagctgtcatggctattggcggatacagcggttctgacccggcgatcacactgactcaattcaaaaaacttgtaaaagaaggaaaagtgaaatacttcttggcttctggaatgggaagaggcggaaacaatgacattgttgaatgggttgagaaaaatggaaaagaagtagcatcagaaaaatggcaatcaagttctgatcaaaaaacagaaaatactgattcggctgatacatcaagcagcaaggcttcaggtgaaaacggcaaaatgggcggacctggcggaatgaatcagtcagcaacattatacgaactacatgctgataaataggaggcaaaaacatgagcagacatattcaatattcaattgttgtacctgtgtataatgaagagcttgtcattcatgaaacctatcagcgcttaaaagaggtcatggatcaaacgaaggaaaactacgagctgctttttgtcaacgatggcagtaaagaccgcagtattgagattttaagagagcacagcctgatcgatccgagagtgaaaattattgatttttcaaggaattttggacaccagatcgccattacggcgggtatggattatgcacaggggaatgcaatcgtcgtcattgacgccgatttgcaggaccctcctgaactgattttagatatgattgaaaagtggaaggaaggctatgaggtcgtgtacgccgtgcggactaaacgaaaaggggaaacctttttcaaaaaacaaaccgcggctatgttttaccggcttctcagcggtatgacagatattgatatcccgattgatacgggggattttcgtctcatggacagaaaagtctgtgatgaaatgaagagattaaaagaaaaaaatccatttgtcagagggctagtcagctgggtgggctttaaacagacagcggtcgagtatgtacgtgatgaaaggcttgccggagaaacaaagtacccgctcaagaaaatgctgaagctgtcaatggacggcatcacgacattttcacataaaccgctgaagctggcaagctatgcggggattttaatgtcaggtgctggatttctgtatatgtttatcgtgctgtatctgaagctattcacagacagcacgattaccggctggtcatcacttattgtgatccagctcctgttcagcggcattgtccttctgattttgggcgtgatcggcgaatatatcggcagaatctacgatgaagccaaagacaggccgctttacatcgtccaaaaatcgtatggaattgaaaataaaagactctatagagaccagcatatgtcataacctcaaaccccctgtccgtaatggacaggggtttttatgctctgagcccgatctaaagcaaaagatgctgatagatatatggaaattgggtaaagaagagattgtgagcttgtactgcggttcagtcatgccgaaataaaaacagcaaaacttaaagatttcgtcatcggctttgctgcatgtcagctgttatattggggggcttttaagaaacgcatgattagagccgtaccagttatgtttaatagaatactggtacccaatacaattccccacgtcaacgtcgattcagagagaagaaagctcagtaaaagaaaagccaatcctgcgcagatcatactcagtcccacggttttcatgttcatgcctcctagcaaacgatgtttctagcatctgatgtgaatgatgtcaatctgtatgatatacggatatctcgtcagaaagtttcatagagcaattaggtcttttatctaataaaaagcctcagaccgcttttacggcctgaggcattatgtcttacgaagttttctcttctttttgatccagtttaatttttttcgtcatttctttgccgtttcggagaattttcacttcaacggtatcaccgatctttgcgtctttatataagatattgcgcaattcactgcctgtatcaatttctttaccttttaggccgatgataatatcctccgcttttaatccggccttttcagcaggagagcctgaagcgacctcacggatgtaaacacctttattcagctggctgccgaacaggccgagtgtgccttcttggtaattttgcggcacttgttctagatcaagcatgctgacaccgatatatggacgttcaatttgtcctttagacagtaattcttcagcaatcggttttacgtcattgcttggaatggcaaatccgataccctcaacatcatcttcactgattttcatactgttaatgccgacgattttgccgtctgtatttaacaaaggaccgccgctgttacctggattaattgctgcgtctgtctgaatgacgttaatgctcgtttcgccggctgatgtagacattgaaaccgttctgtccacgccgcttacaattccttgtgttactgtgcgggacaggtcttttccaagcggatccccaatcgcaataacggtctcgcctgttctaagatcagatgaatcaccgaagtttgccacttttgtgacgtggtcatcactgatttggaggacggctaaatcagttaacgagtcactgcctaccagctttgcagtaacctcagtgccgtcatataaagataccttcagtgatgatgccccttctacgacgtggttatttgtaatgatataagccttgccattctcttttttgaaaatgacacctgaccctgaaccgctttctgtatcttcgctggaatcagaagaactagagccgaacaaagagctgtttgattgtgcctgaagatttgtaataccgacaatcgctggtgaaaggtcttctaccatatctgagattttagaagagtcctcgctcttgaatgcagatgagctgcttgagctttttttagattcagaggaggtgcttgttgctgtaacagattgcgtttgctgctggctggatgattgttttgcagtgtcctgagaatcatggtcgccaagcggtgtaaacgtgtaaatgccaagggcaagactgccgccgatcactccgccaagcaacggtctgaaccatccgaagcctcgttttttcttctcctgatcatgaatgacattgcgggccgagtaggaggtgctctgatcgttctctttcgttaaaaagacctcattctcattacctttcgttctgttttcatcacgatagttatccatcatgttcactccgtttctctattttcacatgtctatttatattgataggtttatgacttgagtttatcataaacaaaaactgtgggataaaaatgaaaagattatgggaaattgtgaaaaagtgcggaaaacggtacacttcatattgtatatgaaaggactgagtcgatggaacagattggattgattggatatggcagcatggcggatatgatcgccagacagctgttgaaacatgaacaaataaaagagaatgagctatttattgagacgagaacgaagggggagcggctgcgggcactcatgtcagattatccaaacgtatcggctgatccgttggagaattgggcaaatacgtgccaattgattttgatatgcgtcccgccgctccatgtcatcgaaacaatgcgccgtctgcacccgtatgtgaacagaaatactcacatcgtatccatagctgccggtgtgccgctgcgtcttttggaggcagaaacagaagccggtatctcacgtgttattcctgccattacgtccgaagcagaagctggcatctcacttgtcgttcacagtgaagcactggctgcagagaaaaaagaatatctgaatgaattgttatcggttttcagccgtgtacgagaaatcaaagaatcgaatttagatgcggccagcaatttaacgagctcggcaccaggattcatagccgcaatctttgaagaactggcactgtctgccgtcagaaacagcagcctgtccaaagaagaagcctttgattttctgattcattcgctatacggaactggcaagatgctgatcgaaaaaaatatgtctttcgaggagacgctggaacgtgttgcaaccaaaggcggaataacgggagagggagctgaggtgatacgcgcctctgtgccggacgtttttgatgaggtgtttgaaagaaccctgaaaaaatatgaactgcttacagaacaggttggtaaacagacatgaatccttgaaagaggattcttttttattactgaatggttgagattttccccagttatattgcatttttcctctttttttaatataatctgttagaatattcataatttagtaaaaaaggaggagcgttatgaaattgtacatgtcagtagatatggaaggtatttcgggtcttccggacgatacctttgtggattccggcaagcggaattatgaacgcggacggcttatcatgactgaagaagcaaactactgtattgctgaagcgtttaacagcgggtgtaccgaggtgctggtcaatgacagtcattcgaagatgaataatctgatggttgaaaagcttcaccctgaagcagacttgatttctggtgacgtcaaaccattttcaatggtggagggactggatgatacgtttacaggcgctttgtttctcggttatcatgcgagagcctcgactcccggtgtcatgtcacacagcatgattttcggcgtccgtcatttttacataaacgatcggcctgtcggtgagcttggattaaatgcatacgttgccggttattatgatgtcccggtattaatggtagccggggatgaccgggcggcgaaggaagcggaagagcttatcccgaacgtgacgacagccgcagtcaaacaaaccatttcaagatccgcagtgaagtgcttgtcccctgcgaaagccggacggctgttgacagaaaaaactgcgtttgccctgcaaaacaaggacaaagtcaagccgctcacaccgcctgacaggccagttctgagcattgaattcgccaattatggccaagcagaatgggcgaatctgatgccgggaacggaaatcaagacgggaactacaaccgttcaatttcaggcgaaggacatgcttgaagcctatcaggcgatgcttgtcatgactgagcttgcgatgcggacatcattctgctaaaggggtgttttaggctttggcgcgatacatgataaagcgtttttgggcaatggcagctacgattttggtgattaccaccctgacttttgttctcatgaaggtcattcccggatctccttttaacgaggagagaggcacaaatgaagccgttcaaaaaaatctcgaagcctactatcacttagacgatcctctcattttccaatacattttctacttaaaatccatcattacattcgatttcggaccttcaattaaaaaaccgtcggacagcgtaaatgatatgctggaacgcggatttcccgtttcctttgagcttgggatgacagcgattgtcattgctgtgatttctgggctggtgctgggcgtaatcgctgcactccgccgcaatggctttttggactacgccgcgatgagtcttgcagtactcggcatctccatcccgaattttattctggcaacattgctcattcagcaatttgctgtcaatctcaaactatttcctgctgcgacatggacgagcccgattcatatggtgcttccgaccgcagcgcttgctgtagggccaatggcgatcattgccaggctgacacggtcgagcatggtcgaagttctgacacaggattatatccgcacagcaaaagcaaaagggctttctccattcaaaattatcgtaaaacacgcactcagaaatgcactcatgcccgtcattaccgtcctgggcacactcgtcgccagcatcttaacaggaagctttgtcattgaaaaaatctttgccattccgggaatgggaaaatattttgttgaaagcattaatcagcgggactatcccgtgattatgggaacgaccgttttttacagcgtcattctgattatcatgctgtttttggtcgatttggcctacggtctcttagacccgcgcattaaactgcataagaaagggtgaagcgtgtgaatctccctgtacaaacggatgaacgccagccagaacagcacaatcaggtgcctgatgagtggtttgtcttgaatcaggaaaaaaatcgggaagccgattcggtcaagcggacgagtttgtcatacacgcaggatgcctggaggaggctgaaaaaaaataaattagcgatggccggactctttattcttttatttctttttgtcatggcagttatcgggccctttttatcgccccatagtgtcgtacgccaatcgctgacagaacaaaatcttccgccctcagccgatcattggttcggcaccgatgaactcggccgggatgtgtttacccgaacatggtatggcgcgaggatctcgttgtttgtcggcgtgatggcagcactgattgattttttgatcggtgtcatttacggaggcgttgccggctataaaggcggcagggttgacagcattatgatgcggattatcgaagtactgtacggcctgccgtacctgcttgttgtcattttgctgatggtgctcatgggaccgggactgggcacgattattgtggcgctgactgtgaccgggtgggtcggcatggcgagaattgtaagaggccaggtgcttcagattaaaaattatgaatatgtactcgcctcgaaaacctttggcgcgaaaacctttcgcatcatccgaaagaatttgctgccgaatactatgggggcgatcatcgtacaaatgacattaaccgtacctgccgccatattcgcagaatcatttttaagctttctcggcctcggcatacaggctccgtttgcaagttggggcgtgatggcgaatgacggcctgcccacgattttatctgggcattggtggcgcctgttttttccggcctttttcatatctctgacgatgtacgcgtttaatgtgctgggggacggattgcaggatgcgcttgaccctaagctgaggaggtagctgtatggaaaaagttctgtcagtccaaaatctgcacgtgtcttttacgacttacggcgggacggttcaggcggtcagaggggtgagctttgatttgtataaaggagaaacctttgcgatcgtcggcgaatccggctgcggcaaaagcgttacctcccaaagcatcatgggcctgcttccgccttattcggcgaaggtgacagacggcagcattctatttaaaaacaaagacctttgccgtctctctgacaaagaaatgagaggtataaggggagccgacatttctatgatttttcaagacccgatgacggcgttaaaccctacgctgactgtcggcgaccagctgggggaagcgctattgcgccacaaaaaaatgagcaaaaaagcggcacggaaagaggtgctttccatgctgtcattggttggtattccagatcccgaagagcgcctaaagcaatatccccaccaattcagcggcggcatgagacagcggattgtcattgcgatggcgctgatttgcgagcctgacatcttaattgcggatgaaccgaccaccgccctggatgtaaccattcaggcacagattttagagctgtttaaagagattcagagaaaaacgaatgtgtctgtcatcctgattacacatgatttaggggtcgttgcccaggtagctgacagagtcgcagtcatgtatgccgggaaaatggcggaaatcggcacgagaaaagatattttttatcagccgcagcacccttatacaaaaggactgctggcttctgtcccgcggctggatttagatggagcggagctgatcccgatcgacggaacgccgccggatttattttcgcctccgccgggctgcccgtttgccgcccgctgtccgaacaggatggttgtgtgtgacagggtgtacccgggccagacgatcagatctgactcgcacaccgtcaactgctggctgcaggatcaacgagcagagcatgcggtgctgtcaggagatgcgaaggattgaacatgaaaagggggaagaggatgaaacgagtgaaaaagctatggggcatgggtcttgcattaggactttcgtttgcgctgatggggtgcacagcaaatgaacaggccggaaaagaaggcagtcatgacaaggcaaaaaccagcggagaaaaggtgctgtatgtaaataatgaaaatgaaccgacttcattcgatccgccgatcggctttaataatgtgtcatggcagccgttaaataacatcatggaggggctgacgcgtcttggcaaagatcatgagcccgagccggcaatggcggagaaatggtctgtttcgaaagataataaaacttacacatttacgattcgggaaaatgcgaaatggacaaacggagatcctgtaacagccggagacttcgaatacgcgtggaagcggatgcttgatccgaaaaaaggcgcttcatcggcattcctaggttattttattgaaggcggcgaagcatataacagcgggaaagggaaaaaagacgatgtgaaggtgacggcaaaggatgatcgaacccttgaagttacactggaagcaccgcaaaaatattttctgagcgttgtgtccaatcctgcgtattttccggtaaatgaaaaggtcgataaagacaatccgaagtggtttgctgaggcagatacatttgtcggaaacggcccgtttaagctgacggaatggaagcatgatgacagcatcacaatggagaaaagcgacacgtattgggataaagatacagtgaagcttgataaggtgaaatgggcgatggtcagtgacagaaatacagattaccagatgtttcaatcaggggaacttgataccgcttatgtccctgctgagctgagtgatcagctgcttgatcaggataacgtcaatattgttgaccaggcgggtctctatttctatcgatttaatgtcaacatggagccattccaaaatgaaaacatcagaaaagcctttgcgatggctgtggatcaagaggaaattgtaaagtacgtcacgaaaaataatgaaaaaccggcgcgcgcctttgtatcgcctgggtttacgcagcctgacggcaaagatttccgtgaagcaggcggagacttgatcaagcctaacgaaagcaaagcgaagcagctgctagaaaagggcatgaaggaagaaaactataataagcttcctgcgatcacgcttacttacagcacaaagccggagcataaaaaggttgccgaagctattcagcaaaaattgaaaaatagccttggagtcgatgtaaagctggccaatatggaatggaacgtatttttagaggatcaaaaagcgctgaaattccaattctctcaaagctcatttttgcctgattatgcggaccctatcagttttctggaagcctttcaaacgggtaattcgatgaaccgcacaggctgggccaataaagaatacgatcagctgatcaaacaggcgaaaaatgaagccgatgaaaaaacacggttctctcttatgcatcaagctgaagagctgctcatcaatgaagcgccgatcatcccggtttatttttataatcaggttcacctgcaaaatgaacaagtaaagggaattgtccgtcaccctgtcggctatatcgacttaaaatgggcagataaaaactgatggcggtgattgaggaaatactgcttctttatgcgaaggagcggtattttttctctttcttgcacgtatacgtagggtgcagagcaaatgaaaggagtgttttcgttgaattacaagccgaaagcgttgaacaagggtgatacagtcggagtgatcgcgcccgcaagtccgccggatccaaaaaagcttgacaccgcgcttttatttttagaagagctcggtcttcaggtgaagttgggcaaggcgctgaaaaaccagcacggctatttagcgggacaggatgatgagcggctggcggatctccatgagatgttcagagacgatgaggtaaaagcagtgttgtgcgcatgcgggggttttgggacaggacgtatcgccgcgggcattgatttcagcttgatccgcaaacaccctaaaatcttttggggatacagcgatattacgtttttacatactgccattcatcaaaacacaggtcttgtcactttccatggcccgatgctcagcacggatattggccttgacgacgttcacccgctgacaaaagcgtcatataagcagctcttccaggagacggaattcacctatacagaagagctttctccgctgaccgagcttgttcctggaaaagcggaaggcgagcttgtcgggggaaatctgtctttgctgacgtctacactgggcacgccatttgaaattgatacgagaggaaagcttctgtttattgaagatattgacgaggagccttatcaaatcgaccggatgctgaatcagctgaaaatgggggggaagctgacggacgcggcgggaattctagtttgtgattttcacaattgtgtcccggtgaagcgagagaagtctctctcgcttgagcaggtgctggaagactatattatttctgcgggcaggcctgctctgagaggatttaaaatcggccactgctcgccaagtattgccgttccgatcggtgcgaaagctgctatgaatacagcagaaaaaacagccgtaatagaggcgggcgtttcagaaggggcgctgaagacatgaaaatcattcgaatcgaaacaagccgaatcgccgttccgctgacaaagccgtttaaaaccgcacttcgcactgtgtatacggctgaatcagtcatagtaaggattacttatgacagcggtgcagtcggatggggagaagcacccccgacgttagtgattacaggagacagcatggatagcattgaaagtgccatccaccatgtgttgaagccggcattgcttggaaaaagcctggcgggctatgaggccattctgcacgacatccagcatcttcttacaggaaatatgagcgcgaaggctgctgtagaaatggctctatacgacggctgggcgcagatgtgcgggctgccgctttatcaaatgcttggcggatatcgagatacgctggaaacagattatactgtcagtgtcaactcacctgaagagatggcagctgatgccgagaattatctcaaacaaggctttcaaacgctgaaaataaaggtcggaaaagatgatattgcaacagatatcgcccgtatccaggaaatcagaaaacgtgtcggatcagctgtgaaactgcgtttagacgctaatcaggggtggaggccgaaggaagcggtaactgccattcggaaaatggaggatgcgggcctaggcattgagcttgtcgagcagcctgtccataaagatgatctcgctgggcttaaaaaggtgacagatgcaacagatacgccgattatggctgatgaaagtgtttttacaccgcgccaggcgttcgaagttctgcaaacccggagcgcagacttgatcaatattaaattgatgaaagcgggcggcatcagcggagcagagaaaattaatgccatggcggaggcctgcggggtggagtgtatggtcggcagcatgatcgaaacgaagctgggcattacggccgcggcgcattttgcggcaagcaagagaaacatcacacgctttgattttgacgcgccgctgatgctgaaaacagatgtattcaatggcggcataacatatagcggcagcacgatttcgatgcctggcaaaccgggcctcggaatcatcggggctgcgcttttgaaaggggaaaaagagcaatgatgcacactgtcatatcagcagtggccaacatctggacagcgcctgattcacctcgtccgtctgatcaattcatgcttcaaccgactgtaatgatcagagactggctggagcgcatgacgtatgatgaacggcttggattatgtacagacaatgtaatccaaactcaggttctctttggcgaaaaggtacttgtgacggcggaacagggggaatgggtttctgtgatcgtgcctagccagccatcccgaaaggatccgcgcggatacccgggctggatgaaaaagtaccagctggaaaaaacaaagcccatccatacacaacacgatgtgatgatcagcaaacctgctgcctttttgtacagaagcaatggggaaaaggagatcgaattaagctttttgacagttctgccccttattgcaaaagaaaacggatattttaaggtttcgaccgtttttggggaaaggtttgtgaggcaaagtgatgcagtgcctgtcagccaacagaaagggactgctgaagacatcattcaaacgggtgcgttttttcttggccttccctacctgtggggagggatcagcgggtttgggtttgattgctccggatttatgtacagtatatttaaggcgaatggatacagcatcccccgtgatgcgggagatcaggctaaggcagggaagggtgtcccgcttgatgatatgaaagccggtgatctgctgttttttgcttatgaggaaggaaaaggagcgattcatcacgtcggtctgtatgtaggcggcgggaaaatgcttcattctccaaagacagggaagtcaatcgaaatcctcacattaacagagacaatctatgaaaaagaattatgtgcggtgcgccgctgtttttcagaataaggagggagacaaatgacgccactgcctttgttagaggtcagccagctaaaaatgcattttgacgcagggaaaaagcggacagtcaaagccgtcgacggggtcacctttcagattcgtgaaggagaaacgttcgggctagtcggggaatcagggtgcgggaaatcaaccttggggagagtgctgatgcgcctttatcagccgacagaaggaagcgtgacataccgcggcacaaatcttcatgcactgagtgaaaaagagcagtttgccttcaaccgcaaactgcagatgatttttcaggacccttatgcttcacttaacccgcgcatgaccgttcgagaaattattttggagccgatggagattcacaatctctacaatacccataaagcgcggcttctcgtcgtggacgagctgcttgaggcagttgggcttcaccccgattttggcagccgttatccgcatgaattcagcggcgggcaaaggcaaagaatcgggattgcgagagcactgtcgctgaatcctgaatttatcgtggcggacgaaccgatttctgctcttgatgtctctgttcaagcgcaggtggttaacctgctgaagcggcttcaaaaagagaaagggctaacgtttttattcattgcccatgatctttcgatggtgaagcatatcagtgacaggatcggtgttatgtacttaggacacatgatggaaattacagagagcggcaccttgtatcgtgaaccgctccatccctatacaaaggcgcttttgtcctcgattccgattccggatcccgaattggaggacaagcgtgagcgtattctcttgaaaggggagctgccgagcccagtgaatccgccgagcggctgcgtgtttcgtacccgttgtccggaggcgatgcctgaatgtggagaatctcgtccccagcttcaagaaatcgaacccggccgttttgtcgcttgccatctgtatcgaaatgctgaaacgaaggaaaaagtgagataaataaaaagagtggctcctttttactagagccactccatttgtttatacttgatgtaaaaactttacacaaaccgggtaagggacagaaaccgttgatgggaggagtgtcaatcggccggtttctttgtctctttcaaacaagacaaggttgcctgtttcttcatttgaagcaacgaggaacccttccgttgggtcaaatacaaagtcacgaggccagtttccttctgtcgacactctttctacgaaagccagctctcctgaatattgattcacttcaaatacggcgatactgtcatggccgcggtttgcgacataaacaaaacgtccgtcctgcgtgacatgaattgcgcttccctggctgttatctgtaaaatcatcagggatggcagaaacgacttggatttctctaaattcgccggctgtcgggttgtattcaagcgcaatcacttcattgcttaattctgtcatgacataagcgtatttttctttcggatgaaaagcgatatggcgaggtcctgcaccgggagcgaaggaatggcttccggattcagtcaacacaccgtctttaagcttataggtgtagagcttatctatacctaaatcaaccgctaccacataattgtgttcaggtgtgaaccccgcgtagtgtgtatgcggtttttcttgtctttcgtgcggcccttttcctgtgtgagcggcctctgaaacaggtgattgcaagctgccgtcttcctgaaccggaaaaacgtgtaccttcccgctgtgataattggcagtcaggacgaattgattttgatcatcaatgcttacgtggcatggcgaagggccatcaattaactgatgattcagaaatgtcaattcgccgctgtttttatcgatttgataggcagcaactccgccttggccgtctgctttttcgatggaataaaggatggtgttgtttttattcggcgccacatatgtcgggttgcccagcttagcggccagctttggctcgctgagtgcttttttctcagtatcaagctcaaatgaataaattccttcgcttccgccttttgtatatgttcccacatatcctatgtattttgtcatgcgatttcccccttaaaaatgatgtcacctctatattaacgtatcttgataaaataagctgttcaaaacatgaaaaaggggaagattcttcattcgcctcgaatcagcggcattgtgcagcacctgaaggagccgcctgatttaataatttctgacaggtcaatttcgataatgtgatagcctcttttcgatagctgttgattgacatggcggttgccagggagactgatgatcgtttttttttcgattgaaaggacgttggtgccaagcgtaaattgttcgtcctcgggcacctcaataagatcataacgttttgccagcatatcggctgcaactggctcaatggcctgtggataaattaacgcttcgctttcagatataatgttaaatacgcagtccaaatgcaaaaatttttcatgaagcttcactggaacgatcgtatattcaggaagtgcctcttccagctggccgatagctgaaatgtcggtgcgctggctgattccgacatagacaatgtcatcatcgataatgacgtctccgccttcaatactcgtatcaagcatgcgggtgtaagagataccttggctgtgaaaaaaatcttttataacggcttcttctccttggcgaatcggttcagtcatgcttgacagaaaggctttttctccgatgacaaatcctatgtccctagtaaaaacctgctctggtagtccgtcgcgaacgggcaaaaggacgacctcaacgttgtgtgacctaagtgcctccactaagcggctgtgctggtcgttagcggtttttacatgaatattgtcatcttcaaaatgtttttgtgtttcgtttataacatcttttatggtcatgtgctcaggtttgcataagatcactttctgaagtgtgccgtattccgttcggcataccgttttgtgctgagatttcgggatggatacgtccatttgtttttcctcctaaagtgtgaagaatacatttattattccctcatcatgaaaatcattaaaccattttaaattttagacaaatggaagagaatattgtttaataggagaatataagtgcatttagctaaaagatcagacatcaaaggggagaaaggtatggaaacaccggaaacaagattttgtaaagagtcaaaggttgtgaaaaccagcagggtgttcccgcttgacacgaacaaccataatacgctgtttggcggaaaattaatgagctacatagacgacattgcctctatttcagcggcgcgccattgcagacgtgaaacggtaacagcttcaatggattctgtagattttttaaagccgatcgggcaaaaggattctgtctgcctagagtcatatgtgacatgggtcggcacatcttccatggaagtatttgtgaaagttattaaggagcatttgatgactggcgaacgggaactcgctgccacatcctttttgacatttgtcgcattagattcaaatggcaagccggtgcctgtaccgagggttgtaccggaaacagaagaagaaatcatgctgcataatacagctgtacagcgtgctaatgaacgtaagaaccgcaagaaacacagccaggcgcttgcgaatgcgcttggaactgataagccttggtgaacgttaaacccaaaacataagttgttttgggttttttttttgtacttttcaatggtgattattgcaatggttagtccgtttttgctaggggattctataaaaaagcaacaaatgtcatgttaaattgataattttgtgacaactttattaaagattcattttagatatatcttttattcgtaagatcatgtattttaaagatatattatgaatacatcttttcgaaaggattgtttataaaatgttagataacaaaacaatcgaaattattaaaagcactgtacccgtattgcaacagcatggagaaacaatcactggccgtttttacgatcggatgtttcaagaccatccagagcttttgaacatttttaatcaaacaaaccaaaagaaaaaaacacagcgaactgcactggcaaatgccgttattgcagctgcggcaaacattgaccaattaggaaacatcattccggttgtcaaacaaatcggccacaagcaccgcagtatcggaattaagcctgagcactacccaatcgtcggtaaatatttgctgattgcgattaaagatgtattgggagacgctgcaacccctgacattatgcaggcatgggagaaagcgtacggagtcattgctgacgcgttcatcggaattgaaaaagacatgtatgaacaggcggaagagcaagccggcggctggaaagagtataagccattcgttatcgcaaaaaaagagcgggaaagcaaagaaattacatccttctatttgaaaacggaagacggcaagccgttacctgaattccaagcagggcaatatatcagcatcaaagtgcggattcctgattctgaatatacgcatatccgccagtacagcctgtctgatatgccgggaaaagactattatcgaatttccgtgaaaaaggatggtgtcgtgtcttcctacttacacgatgggctgcaggagggagattcaatagagatcagcgcaccggcaggggactttgttttagatcatgcatcacaaaaagatctcgttttgatcagtgccggagttggcattacaccaatgatcagcatgctgaaaacatctgtttccaaacagcctgaacggcaaattctgttcattcatgcggcgaaaaacagtgaatatcatgcattgcgccatgaagtagaagaagcagcaaaacattctgctgttaaaacagcatttgtgtatcgcgagccgacagaggaagaccgtgcaggtgatctgcattttcatgaaggacagattgatcagcaattcctcaaagaactgattgccaacacagatgcggattactatatttgcggttcaccgtcgtttattacggcaatgcataagcttgtatcagagctcggaacagcgccggagtctatccattacgagctattcggcccgcaattaagtttggcgcagtccgtttgaacacatacatgaaactcttctcctttcagagaagagttttttattgagatataagaaggcagacaagcgccggtttctacatccggacaatcacagacccttgccatttgtgcatacacggttttgctgttcttgcattgttttcagcaattcattgtttacctcaatcgctctaattagttgctccatccttagctccaaaccggccagcctgtcgattgtttgctgctggtagctctcgggttggggagccaaaggcagatcaaagggccaaagggtattcgacttctgatttttcatattgcgtattgcgcctccaatcggtgtcactttctattatgttatgttcaggcgatatgcacgttcgcctagacactgatgcatagagggcctgccacggggtacaataggctcaatatgaccagcggatggaggtaaagatcggtgttatggatggtatgggtatttttactgaagccagttatcgtattttcgattgcatatattttgtttcggcttgccggtaaaaaagctgtgtcacaaatgaacaattttgacctgcttttgaccttcgcaatcggaaccattatcagtgagccgatccttacatccaagctgccgatgtcaatttattatgcgggtgcttttttggtgctttatcttatcatgagcaagctctctttatctaataaatggcgatggctcctagtcgtgagcccgactgtcctaatccgaaacggggatattgatgaacgcggccttcgtaaagaaaggctgactgttaatgagctgcttggaaagctgagggaaaagggctatgccgacccggctgacattgatcttgctatcattgaagaaacgggagaagtaagcgtcatcccgaaagaggaagcgagagcggtgcaggtgcgggatttaaatatggaagctgaacggaattttatcccgattccgctcatactggatggcgaaatccttgatcataatttgaaatatctccaaaaaaaccgatcctggctgtttgagaagcttgaggaaaaagggtacagccccaaactgctgtcttcgattacccttggcacgatgaatgcacgcggtgatatatcccttgatttaaataccgctaatgaaccgcagcatgatccttacttatataaaccgggaaataacaattaagatggctctctcttgtaatgagagcttttttcttttttaaagggaatttttgtttggtgtcaaatgtacctagttaggaggggaactgaacatgaaggacttatccataagaaacgacatggcgccaacggtcagtttgctgtattccgcagtggaagaaaacagtctccgtctggcttccatcgtaagccatatgacacacagtgaactttactataaggggcgctgccaaacaaaaaacagcacggctcagcttttgcaccatatcacaaatgttgatatcagatgggtctggcgtatcaaggaaaatcggatcccggaccatattgaacaggcatacggcccgatgacagatgaaagcggacggctgcctgaaccggtgaatcagccaaacttagatgaactcctgaaaagacatcagcatgtagtagagaagctgaaatcggtatgcttcactttaactgaaaatgctttgaaccagccgctttccttcgaaggtgacaccgcgacgatacgatggggaatttggcatatggcagatcataaccgctatcatcaggcacatattgaagctctcaaaaaagaatggaagcaggatgtggcgaagtatgaacgctaaaacgaagcttgtgactgatcgaattcgtttgcgctgtatggaagatcgggatcaagccactttgtttgggctgctttttaatgatcctgacgtcatgacatattattccggtttaaaagataagaggcaaacccgcgagtgggtcaattggaaccaacgaaatgaaaaagggtacggcgttagtctgtggatcgccgaagataagcggacaggggagtttttggggcaatgcggcatcgttccccagcagatcgaaaatcaaaccgtaatggaaattggatatatgtttgcccgccgccactgggggaacggctatgcgcaagaagcagctcgggcctgtctggacatggctttaacgagcggcagttcggcaaaatgacggctttgattgatccgggtaacaaagcgtccatacgggtagcggagaaaatcggcatgcattacagcaaaacgatcagaaaatggaataaaccgatcgaggtatatgaaagaaaatcttacaattgaaagatagagctcagtttagtatcatgatatcatgtaaagttttctagggttccgcatgtcaattgacatggactggtccgagagaaaacacatacgcgtaaatagaagcgcgtatgcacacggagggaaaaaagcccgggagagtcaatctcatgtgagacgactgtccggggtttttttgttttcggagaatcctaatagatagaaaggaatgactcaaaatgaaatggggattggtcgtgcttgccgctgttttcgaggttgtttgggtgataggcttaaagcacgctgactcagccttaacatggagcggcactgccatcggcatcatattcagcttttaccttctaatgaaggcgactcacagtctgcctgttggtaccgtgtatgccgtctttaccgggctcggcacagcgggaacagtacttagtgaaatcgttgtttttcatgaaccggttggatggccgaagctattgttaattggtgtgctcttaatcggtgtaatcgggttgaagcttgtgacacaggatgagacagaggaaaaaggaggcgaggcataatgctgcactggatcagtttattgtgcgcgggctgtttagaaatggccggcgtggcccttatgaatcaatatgcgaaagaaaaaagcgtgaaatgggtgctgttgatcattgttggttttgccgcttcattttccttgctgtcgtacgcaatggaaaccattccgatgggaacggcttacgcggtctggacaggaattggcaccgccggcggggcgcttatcggcatcctcttttacaaggagcagaaagacgccaaacggatcttctttatcgcgttgattttatgctcagcagttggtttaaaaattctgtcataaattgatttttatcaaatcttcagtataatggataaatagtttagacttacaaagataagagggattattcatgaaatcatatatgactcagcggttggacgaataccgtgacggaaatgaggataaagggcggctcttggtcagctgccccgatcagccgggtatcgtctctgcagtttccgcgtttttatttgaacacggtgccaatattatagaatcaaatcaatatacgacagaccctgaaggcggccggttcttcctgagaatcgaattcaactgcgcaggcattcgtgagaaaaaaacatcacttcaggcggcgtttgcctctgtagcggataaattcgacatgacatggagcttaactttggcaagtgaattgaagcgtgtcgccatttttgtttcaaaggagcttcattgcctgcatgagctgatttgggaatggcaaaccggcaacctgatggcggagatcgctgttgtcatcagtaaccatgagggagcgagagagctggttgagcgcctgaacattccattccactatatgaaagcgaacaaagacatcagagcggaagtcgaaaagaagcagcttgaactgctggagcagtacgatgttgatgtcatcgtgctcgcacgctatatgcagattctaactcctgattttgtttcggctcatccgaatcgcatcatcaatatccaccattcattcctgccagcttttatcggtgcgaatccgtacaaacgggcctacgagcgcggcgtgaaactgatcggtgcgacatctcattatgtgacaaacgatcttgatgaagggccgatcattgaacaggatattgagcgtgtggaccaccgcgataatgcggaagcgctgaaaaacatcggaagaacaattgagcgcagcgtgcttgcccgtgctgtgaaatggcatttggaagaccgtgtcatcgttcatgaaaataaaacaatcgtctttaactagactgcaagaggcccgcgcaatgcgggctatttttgatgacaaaaaaccttgacaagtgtcttttttctttgcataatataaaaaaatcattgagcgttgaagaggattagtaagcagacctttctgtgacagagagcaaaatgaatcgctgaaacattttgccgcatgaaacctgccgaacctgccttggagtcctagggggaaaacctaggcgcataacctggcgttacaggagagcggagcgtgcacaagcgcgttcaatcaaggtggtaccacggaaacccatttcgtccttatgaatcaggatgaaatgggtttttttattgtagaagagccgcggaggagaataaatgaaaaaacaaagaatagtagtgaaaataggaagcagttcgctcacgaatagcaaaggaagcattgatgaggcaaaaatcagagagcatgttcaggcgatttccgtgttaaaaaaagcggggcatgaaatgattctgattacctcgggtgccgtagcggcggggttttccagcctcggttatccgtcccgtcccgttaccatcaaaggaaaacaggcggcggccgcggtcggacaaacactgttaatgcagcaatatatgaatcaatttaaacaatactcattaactccgggacaaatccttttaacgagaaatgatttttcgaaaagagaacggtaccgaaacgcgtatgctacgataatggaattattggaacgcggcgtcattccgattatcaacgagaacgattctacatctgttgaagaattgacattcggagataatgatatgctttctgcgttagtcagcggattgattcacgcggaccagctcatgattctcaccgacattaacggactgtatgatgccaatccaaatgaaaatcctgaggcgaaacgatttgattatttgccggagatcacgcctgaattgcttggatatgcaggttcagctggatcaaaggtcggcaccggcggaatgaaatcaaagctgttagccgcacaaaccgcgttgtctctgggagtgaaagtattcattggaactggcagcggagagcaaaaacttgcggacattttggacggcaggggagacggcacttatatcggagacaaagaactatcttcggttaacaacacaaggcagtggattcagttccactcgccgatatcgggagaaattatcattgatgcgggtgccgaggaggcgatgatccataatggaagcagccttttgcccgctggcgttgtgggcgtgaacggaagctttccgaaaggggcggtcgtggaagtcaggggaccgggcggcgtgatcggcaaaggccaaacccattactcctctgaggagattatggaggccaagggcaaacgcagtgacgaacttgattttgagaaaacgtttgaggttattcataggaatgactgggtcaatgtaaaagactaggaggcggaaaaatgagtgaagtttctgtaaaagcgaagctggcgaaagaagcagcagccgaaatgatcatgaaaacaacaaccgagaaggatgaggcgctcagcctcattgcaaacggactccgtaaagaactggattttctcttggcggagaatgcaaaagacattgagaatggaaaagagaatggtttaacaccggacatcattgaccgtctcacattggatgagaaacggatacgcgatatcgcggacgcggtggagctcttaatcgacttagcggacccaatcggcgactctcttgaaacgattgaaaaagaaaacggcctgtttattgaaaaaatccgtgtgccgctcggtgtcgtaggaatgatttatgaggcgaggccaaacgtcacagttgatgcggctaccctttgcctgaagacagggaacgcggttgtgctgcggggaagctcctcagccatccacagcaacaaagcgctcgtcagtgtcattcacagagcacttgagcaatcagcgcttccgattcacgctgtgcagctgattgaggatacgagcagagagacagcaaaagagctctttacgttaaatgatggcttagacgtattgattccgcgcggaggcaagaaactgattgatctcgttgtgagagaatcaacagttcctgtattagaaacgggagcaggaaactgccacatattcattgacgaaacagccaaaccgcaaatggcagaaaaggttgtcgtaaatgccaaaacgcagcggccttccgtatgcaacgcgattgaatcattgctgattcacaaggcatgggcaagacagcacgggaaagaattgctggcccagctggaaaacgcgggagttgaaattcgcggtgatgaacttgtatgtgaacttcacccttcaagtaaacaagcatcaaaagaagattgggaaaccgaatttttagcgcctgtcctcagcgtaaagacggttgaaaacgtccaagaagctgtgaagcatatccaacaatacggcaccaatcattcagaagcgattttaactgaaaatgacaaaaacgcggcatattttcaaacggctgtcgatgctgccgcggtctatcataacgcgtcaacccgctttaccgacggctttgaattcggctacggagccgaaatcggcatcagcacgcaaaagcttcatgcaagaggaccgatggggcttcctgcactgacttctacaaaatacatcattaaaggaactgggcaaatccgtgaatagcggggcaatgttcaatgaaaaagcttatctcattacgagataagcttttttatacgcgaaaaattgacatttcaaatttaattgtgtacaatttaattgtataaaatatatcgggggaatgaaaaatgagtcagccattatttacagcaactgtttcagcggtaggaggaagagaaggaaaggtcatttcatcagaccgcgttcttgagcttgatgtcgcaatgccggggacaccgagagccaagaaattagaaaaagcgacaaatccagagcagctgtttgcagcaggttatgcagcttgctttgacagcgccctgcagcttgtcgcaagaacagaacgggtaaaagtagagacagaggttacagcgaatgtaagtctgttaaaggatgaagcggaccagggctacaagcttggtgtgacgctgcaagtaaaaggagaaggagtcagtgcatcagaattggaggcgcttgtgaaaaaagcgcacggcgtctgcccgtactcaaaagcaacctccggaaatattgatgtgacacttgaagttgctgaataaataaaaagaggatgcctgtacaaggcatcctcaatttttttgatgaagtgtttccagcaatgtatatagagcggattttaactgtttgagatcctccccagactgctttgagagccccagaattgtctctggaatgtcaaccgctttttcttttaataacgctccgtcctctgtcaggctgatcaacacggaccgctcatcctcttcagatctttttctcgtaatcaaaccctgttgttccattcgtttaagcatcggagtgagcgtccctgaatctaaatacagctgttcgcccatttttttgacagtaagcgtttcatgttcccataacaaaagcaaagccaaatattgagggtatgttatattcagcttatcaagcagcggcttgtattgctttgtcatttcccgcgaacttgcatatagcaaaaaacatagctgattctccaatttcatatgatcaaatttattttccattttgttcaccaactcttttttgtcattcgattctattgtatctgaaaaacctcacttttcctattctcggcaaacatagcatgtttaaaaagattagaaagggaaatataacaactagatacaaataaggaggttgggaaatatggcactatttacagcaaaagtaaccgcgcgaggcggacgagcaggacatattacatcagatgacggtgttcttgattttgatattgtcatgccaaatgccaaaaaagaaggacgaaccggcacaaatccggaacagctctttgcggcagggtatgctgcatgcttcggcggcgcgctcgaacacgtagccaaagagcagaatatcgaaattgattcggagattgaagggcaggtcagcctcatgaaggatgagagcgacggcgggtttaaaatcggtgtcacacttgttgtgaacacgaaagatttagatcgggaaaaggcacaagagcttgtcaacgccgctcatgaattctgtccttactcaaaggcaaccagaggaaatgttgatgtaaaactcgaattaaaataatgaccggcatcctgagtgttctcaggatgtttttttggtgtcggagcatgcggggcgggcacagatttatgataaaacttcagagaagcgtttgaagcatgcctttaaaccaaaagttacagatgaagcgggtggctggcacggtgtctgccgtgctgaattgcgcgtatatgctgttttgtatttgcacagggcatagcggctacttggagaaataacaaggaccaggccgcgcatgcctgatccttttaatattctttcttattggcgaagttccgccatgcttgaaacggggataaatgctctgttagtgtcacttgataaaaggggatcgttctttcttcagcaggtttatcaatttctttataaatgaatgaatcatcaaacccggcttcggcagcgtctgtgtgctcagctgcatagaaaacggctttaggccgggcccagtagatggcgcccaagcacattgggcatggttcacagctcgtatacaaaatgcagtcatcaagctggtaggctcctagcaccttacaggctttccgaatagctgtgacttccgcgtgggcagtcggatcattgcttgttgtgacgttgttctgtccttctgcaataatggctccgtctttcacgataacggctccaaaaggcccgccaactcctgcattcaccccatcacgagcaagatcgacagcccgctttaagaactttttatgattcatcccaaaccctcctgtcagttgagtgttataagtatagccgaaaaaggggcaaagaacattctcaaaaaagtgcaaaataaacaaagtatttgggggatttgctaagataagaggagaaaagaggaggggtaatgatgctgcatttatatattgccaggcacggacagacccaatggaacgtggaaaaacggatgcagggctggctggattctgatttaacagaacttggactgtataacgcccgcgctcttggggagcgtctgaaggatattgaattgaatcaggtatacatcagcccgagcaagcggacagaagagacagcaaaaaccgtactgggatcgcggaggctcccgctggttaaagatcatatgttcagagaaatgtcactgggctcatgggaagggaaaaaacaagaagatattgaaagggacgaaccagatctttttcatgcttattttcattatcccgaagcttatcgccagcagggatgtgaaacgttttttgactttgaaaaccgggtaaggctggctctccaaactattttgagccttgtggaatttgatgaaaatggaacagccaaaatattaatagaaggggacgggaagcatcggaaaccgatttccgctttctaatagaaaaaaccatctgccaaagacagatggtttctattttatacaagctgtgtctgctgtgctctcgcctgttttgcggcttcaaccatgtttttcaatgcggcaaccgtttcttcctgctgtcttgttttcaatccgcagtccggatttacccagaagcggtcagtcggacagacggcaagcgcctcaacaataatgttgtacatttcttcagttgacggcacacgagggctgtgaatgtcatatacaccaaggccaagccctttcaaatacgggtggtcttttaagtaatctaaaaatcctccgtggcttctgctatgttcgattgtaatcacatcggcatcaagatcattgattgtatcaacgatatcttcgaagttgctgtagcacatatgtgtatgaatttgtgtctcgtttttcacggaagaagtggttaatctgaaagcttctgccgcccaagtcaaatactcatcccaatcgcgggttttcaatggaaggccttcacgcagcgctggttcatcgacttgaatgatttgaatgcctgcgtcttcaagcgctttaacttctttgcgaagggcaagcccgatttggaaggcgatttctttcctcgagatgtcgtttcgagggaaagaccagtttaagattgtaaccgggcccgtcagcattccttttacatgcttggaagtcaatgactgtgcgtagactgtgtctttcactgtcatcggttcaataaattcaacatctccgtaaatgactggcgggcggacacagcgtgagccgtatgattgaacccaggcatatttagtgaaggcgaaaccggccagcttttcaccgaagtattcgaccatgtctgtccgttcaaattcgccgtgaacaaggacatcaagctccaattcttcctgaatatcaatccatctttttgtttccgcattgataaagttttgatactgttcatcggaccactcagctttccgccatttttggcgtgcgctccgcacttcagcagactgcgggaagctgccgatcgttgtcgtcggcaaaagcggaaggccgagagattcattttgcagggctaaacgttcttcaaacggaatcggacgcttgaagtctttatcagttaattgctcaagctctttcttttgttcagaattggcgcctgttgcaaactgtttaagcgcctggatatcagccttagcctgctgaatctcttcgctgatcgccgcttttcctgatactaagccttctttcaaagctgttagctcggccagcttttcttttgcgtaggataatccgttcaataggtctttttccaaatgctcatcagggtgtttcgctactggaacatgcagcaggctgctggaaggctgaatccacagttcatcaacttttgcaatgctgagaatatcaagaacagcatcgagacgctcttcaaggtccgctttccaaatgttgcgtccgtcgataacgccggctgccagcactttgtctgtcgggaagccatgtgttttaagctgttccaggtttctgcctttgtcgtgaacgaaatcaaggccaattccctgaaccgggtaagagatcagctcttcataagcatcaacagaatcaaaatacgtctgcaaaagcacattcaaggatgaaagctcacttgtaatgctttcaaataattcttttgcaccgcggacatcttcactagaggcggtaacgagcgccggctcatcgatttgaacccattttacgccttcttcttcaagctctttcaaaagctgtacatataatggcacaaggcgtttttggatcgcttttgcttcagacggttcatagcctttagcaagcgtaacgaacgtataagggccgacaatcacaggctttgtttccacaccgtattcctgtttgatccggcgataatcttcgagttgtttgtttcttgtcagacggaactcaatgctctcgtcatattccggaacgatgtaatggtaatttgtattaaaccattttgtcatttcactagatacggcgtctttgattccgcgggcgatagcgaagtatgtatcggtagcgtcagtcaaatgtctgaaacgtttcgggatccagttgaagctgactgctgtgtcgagtacatggtcatactgtgtgaaatcagaaacaggcacaacatcaatctgctggtcaatttgtgtttttactgcggataaaaatagttcgtcgctttgcttcaaaaacgtatctttatcagtactgcctttccaatacgcttcaagtgcttttttccattcccggttcagtccgattctcggaaatcctaaattcgatgttttgatggttgtcattgtttctcctcctttatatgtaaaacactctctttcacccgcggatacaggctgctaagaggttttctcacaacaaaaagcctctttcccatgagagaaagaggcttttctacgtaaaacactgcctctctcatctctcagacacaatctgatggaattagcaccgtgccttatgagacatcagtctcggcgcgaaaagcagtgcgccccatttcacaatggtattacggtcggttgctgttggggtcaaaaggccaatccctcgcccaactctcgataagagaaaatgttattaattttttgaaaagttgaatcatttgttggtaatcttaacagtaattcaaattcattgtcaacatagaatttgaaatttttatttatatgatgtggtgtatattatataagaaaaataatcttatagggttaacaaatgtgattgctctgctttttctgcgagttcatcaggagctgttaaatacaggaatccattgcctgccagcgtttttgcaatatcaagaggaagtgtcctgcggattagctgtgcgaaaacctcagattcagaaagctttctttgaaatgattcttcttcatagcttttgattaaagcaagcgcaccgctgacatgaggggcagccattgaagtgccggtcagcttaccgtacttcttgttgggaagggtggataagatattttctcctggtgccacaaggtcaatctctttatttgcgttagaaaattctgataattctcgtgctactgaaacagatccaactgcaatgacttcgttataagctgcggggtaggaaagctcttctgtgcgttcgtcgccgtcaccctcatttcccgctgcacaaacgacaagcactccgtttttgactgcgtttttcactgcttcttccagctctggcacatcgcttggccctccaagggacattgagatgatgtcgactttctgttccaccgcgtagttgatgccgttaattatccattcgtattgtccgctgccgttctcgccgccaagaaccttcacaatcaataggcttgcctcaggcgcgactccggcaatgcctccgtttgaatcattagctgcaattgttccggcgacgtgtgtgccgtgtccgttgtagtcggaaattgcatcttccttgccgccgtcgtcatccgtgaagttctttccgccgatgatttgattttttaaatcagggtggcttgtgtcgcagcccgtgtctaatacagcaactttaatatttttgccttttaccccttttgcccacatttctggcgccttaatcactttaatgccctcaggaagctcgtttacatccatgatctgctcattcgtcacatacgggatcaagcggatttcaccattcataaaaaagccctccttttttatgctttcaagtggattcaagggtgttgcctcatattatatgaaaaaaacaagcgctcggacagagccatttgaagcattttgaaaaaataggatacacaccaaagaattagtaattttcaaaatattggatggcttcggcgtgtatgactgggattcaactgtaagtcaagttataatagtgttggggaaaggagcagtgtcatgaaactgaatgaaaaattatatgcatttttttcagagcatgtggaacaaatggccgaggaatggattgaaacgatggaggaaagtgatccgaattcgctttacgccctacataatgcaacagtaacggaagaattgaaagagcaggacagagaattttaccggcatctgaattacatgtatgttttaccggaaaaacaatttctcgaagagtttcaagagtgggtcattgagctgaccaacgatcaaaaacatctcgacacaccggttcagtatgtcattcgggagtttatgagaaacaggagattatatacgaagtattttgagaagttcgcagaagaaaatgagtcagcgtttgaaccgggagagaagcaaaaatgggcagatttgattgtaaaagtatttgatttcaccatttatacattcgttgatcacgctgaaatgaatgccaagcagcaattaaacgcccaaagagaaatgatattggaactaagctcacctgtcattaccctgagcaaatcaacagctctgctgccgcttgtcggtgacattgataccgaacgggcgaagtttattctggaaaacacgcttcaagcttgtgcgaaaagacgtgtggagcatctgttaatcgatctgtcaggtgttgttgtggtggatacgatggtggcgcaccagatctttaaattgattgaggcgcttaatctgatcggtgtccggtcaaccctgtcaggaatcaggcctgaaattgcgcaaactgctgtacagctggggattgacttttcgaatattaccattaaaaccaaccttgcccaagcattaaactatcatcaataaaaaaatccgctatctgtgatagcggattttttatgatgcgaaacataaagatacgagaaaggatcccgcgaataataagaggacgaggcaaaagaacacccagtcgcgccggttcacgctcaatttcctataatatgtccggtttctgcttcctgtaaaacctttcgattccatcgcaagcgctgtccgttccgcttttctgatggcgcttgccaatagcggtatggtatatcgttttaacgcactgattttcttaatgatgccgctctccgccgctcctcctctgattttatgagcctgctgaatcagctggatctcatcctttaacagcggaagaaagcgaaagcctgcaatgacaccgtacgcgagctttggtgagagcctgcactgctggacaaggctcagcataaataaaatcggatcggttgtaaaaacaaacatcatcgataaggcggaaaagcataaaatacgaaacccaagggagatgccgacagacacattatcgctgttaattgagatagggcctgcttgaaacaaaaaattattcggtgttgtcggcacctttccaaaaactgcggctgtccacacgcacccgaatgctaaaatcaaaaacggaatcgtaaacaacaaccattttttcaatgggattccggccgccagtagaacgcccgcaacgatgatgatataaaaacatgccggagtgtaagggttgtaaataaacgacagcatgacgacacaacaaaaaaccgccgccgctttcacagtcggattaatgagatgtaacggctgcttcatcacgcacctcctcttgatatgccatccattcatatagaaggggaagggtgagctttgctttttggacaagccctgtttcttgagaaaacaactgcgctggagatccgtcaaaggccaggcctgtatcgtgaagcacaagcacgctgtcagcatacgaagagactagctccatatcgtgtgtaatcataaggacagcggttccctctgtcttgatacgctgaatcatttccatgcattcagtcaccgtgcgggcatcctggccaaaggttggttcgtctaataataaaacctttacgttatgcatgagcatagtagcaacgctcagtcgccgtttttgcccttggctgatcgcaaacggatgatgatcagccaaatgcgcaagaccaaaacgctgcagcaggtgttgcgcttttttctcagtttcagcatttgctttctggccgaacagaagctcgtcatataccgtatcggtgacgaattgatgctcagggttttgaaaaacaaatcccatccgtttacgcaattctttttctttatatttctgcagcggctgatcatagagaaggattttgccgctttgcggtttcatgagacgggccagaactgataggagcgtcgattttccagttccgttcggaccgacaagcgccgttaaagagccttcgcgcaacgaaaagctgatgtctttgaaaatcgcctgctgtcctctcgcgaacgaaaggctgctgacttcaagcacactctccccaggaggggctttcttctttttggcatgcccggcaggaataggctctttgaacagcatctcttttgataaagtaaacggcatactcagcttttcctgcagatgacagacctttggaatggcgatgcccaatttctttagtgtttctgcttcatgctgaaatagatttttcgtcaggccatccagcgcttttttgcccgatttgtcgagcacgatcgttctctcaatccaaggcgcccattcatcaagctggtgctcaatgacgaggaggctgaaacctttttcccgctgaagatccttcatcagatgaacgaactcccgcgctgagaaagggtctaaaagagaggtcggctcatctaaaataataagctcaggctccatcgccaaaatacaggcgagagccactttctgcttttgtcctcctgaaagggttgagatcattttttcttttaaatgggtaatgcgtaatttttctaatacggcgttgattttctctgtcatttcttcttttggaatttgcagattttccagcccgaacgctatttcgtcctccaccgtcagcatgcagaactgctgatcaggatcctgaaaaacgaccccggcatgctgagcaatcgtttcggaggtttcagcatctgtgaccggctgttgaaatagaaagacatgtccggactgaatgccgtcgcaagcctccggatatagaccgtttaaacaaagggcgagcgagcttttaccgcatccgctcggtcctaataataatacacattctcctttttgaagctcaaacgaaatgtcttgaaaaaccggtttctcgtcttcttcataagagaagctgagctgctcaaccgtcagaagctcatcaaaggcttgcatgttctgacgcccgcttccgtttctttttcagttcctttccgagtgccattccgtttaacacacctgtataagcgagagagtcgctgacagcttttccgagaagccccgccaaaagcgcgccggaaatgaggcggatcacaagcataatgagcagataacctggtgaataggctgcatagccagaaacaaagagatcatagataaagctggctactgaagaccccataccggccagcataaggacagggagagagtatgctttccagcgtgttgcaagaaatacagcctcagccccgagcccttgaacaatgccaatgacgatgaccatcgggccagacggatttcccagcaggcactcaacgagagcggcaatgatttcagaaacgagcgcagcacccggttttcgaatcatgtacgcggcgatcacagaaacgataaaccaaatgccgtaaatcggttcataggcgattggcccaaacatacctgcaagtacgtttccgaaatgtgtaaataataaataaacaacggcaaatacgatactgataacggacatgatgacaatttcttttactttccagcttttcatgttatccctgctttctgttttttcttgatggactgttagccgaaagattcacagtcatggtgatgtggtttgtttgctgctcagccatgcggaaaacggcttccaatgtgctgaatacgtcatgcgcatccccgtcaagctcgctcgcgtaatggacaccctgtacgaaagtgccttgggcttttgcaatgtcgacagccttcataatcaatcccatataatccggctcgttcattggataaagggcaaattggcacggcgcttccgccttcaagcctcggacagcatcttcattgacacgcttatcacctttggaaagatatgtatccccctgtgtgtcacccgggcatccaatggaaaacgtgccgttcatgacgatgtgtttttcgctgtttgctgcatgaaggtaaatggcttttgcagcatcgaatacatgatcaatcgatccgcgtaacaccgtgctgatatggtcggttttcgtccataccttggatgtatctgtttttttcaacgcagacttgatcacactgataaaatcatccgtcatcggatataaagagaagcgaaaaccggcgattctgcttgtaccgcaaatatgctccattttctccgacctcctgtttttttggtaaaataaaaaactgcatatcctaagggaatatgcagtcatagatcgattaagcgcacaaaaaaatacaccattcggtcaacctgcacttccccacgctggtattatccagatcgggtcataagggatcaaagcgcgtttcttccgcgctttatctcagccaaaacagcacccctagtgctttccgtatacaattttttattttgacatcataatagatgataagaatcattttgtaaacaacgaaatcatttttttcatatagggacgggagaggatgatcaaatttggaaaaaggacacatattaattgtggaagatgaagaaaaaatcgccagggttcttcagcttgaattggaatatgaaggatacagtgtcaccatcaaacacaatggcacagaaggtctggatgcggcagcgaaaggcgggcattccttggtacttcttgatgtcatgctgccggggcttagcggactggaagtgctgcgccgcttgagaaaaacggattcgcagacaccggtcatattattaacggcgcgagacagtattcctgataaggtaacaggtctggacatcggtgcaaatgactatgtcaccaagccgtttgaaatcgaggaattgcttgcgagaatcagggcggcgctgcgactaaatggaacaaaaacggaagatatcggcacctttcttacatatgacgatttacgggtgaacgaaaaaacccgtgaagtgagacgcggagacaaagaggtggaattaacgccgcgggaatttgatttactcgtctatatgctaaagcatccgcagcaagtgctaacacgggagcaaattctaagctcggtatggggatttgattatatcggtgatacaaatgtcgtggacgtctacataagatacatcagaaaaaaactggactatccttacgaaaaacagctgatccatacgattcgcggggtcggctatgccattaaggggtaaacgatgaagctgaagacaaagattcatctatacacatcaatatcactgttgattttattaattttggttcataccgcagtctatctcattttttcgtccgcgctgacatcaaaggatgcggcccggcttgctgatgagacggataacatggccgaagcgctgcgtgcggctgaaacagaaggagtggctttgcaggatatgctgcaggcctatcttccggcaaatggcatggtgcgtgtagtgaatggtgatcaaaaagccgttatgacgatcacaaaagaaaaagcctataaagattttcctctctcttttcatagcggagaaaaggcagatgtgaggaaacatgacggcaagctgtttgccgaggctgctgttccggtgatttggaccgatggacaagtggtgtctcttcagctggttgaaaggcttgagaacacagaagagagtctgtttctgttgaaaatcatcttaatcgctgcaagtgctgctgtctgcattgcttctttttttgcaggcagcttgctactagcccgccgaatcatcaatccgatcagacgattaatgatcacaatgaaagacatacagcgagacaaagaatttaaaacgatttctttagaaggacagtccaacgatgaattgtatcaaatggggctgacatttaatgaaatggcaatgatgctgaaggagcactatgataaacagcagcaatttgttcaagatgcttcacacgaattgaaaacgccgctcaccattatagaaagctacagcagcctgatgaagcggtggggggcaaaaaagccggaggtgcttgaggagtcgatagaagccattcactcagaagcggtgcatatgaaaaaactgaccaatcagcttttggcgttggccaaaagccatcaaggactcgaggttgatctgaaaacaatcgatctgattaaagcggcgcgcgcggttatgcaaacgctccagtccgtttatcagcgtgacatattgcttgaaacagataaagagagcctgcttgtaaaggctgatgaagaacgcatcaagcagctgttgaccattttgcttgataatgcaataaagtatagtgaaaagcctattgagatgtcagctggaacgaggaatggacggccatttttatcagtgagggatgaaggcatcggaatacctgaggagcatatcccgcatttgttcgaacggttctaccgggcagatgaagcacgaaacagaaaaacaggcggaacgggtttaggcctttccattgccaagcaaatcgccgatgagcatggcattgagctgtctgtcaaaagcaagccgggacaaggaacagctgtcaccatgcaattcagcgaacagaatgggggaggccgatgactaaaacaataaaaacagtatcttttgccgcagcagccattttagttgtcatcatctgtacgtttctcatcattcggcaaacccatgagaacgtattgtcaaaggagactgtcgtaaaaaaaatcgaatcctcttatgaaggcaaggtcacgaaagcaacacaatcaaaggataaaaaaacatatgatataacgcttgaaaatcaaaagggaacttactttgtaaaagcagacgcaatatcggctgacattctttcaatgaatagagtaaaagcagtgaatccatctgccatgacagaaaaagaagccgagcatctcgcgcttgagcgggtgccgggaacggtcaaaaaacaaacacgacaaagtcgagttgccacttataccatacaaaaagaagatgggaaaacatacgaagtgaaggtagacatgcaggcaaaaacagtcttgtctgccgatcaaatcagcagcaaagatcaacaaaaaacgccgattacgaaaaaagaagccaaaacaattgctgagcgagaaacgggaggaacagcggatgacgcagatctcgaagaaagtgagggcactctcatctttgaagtggacgttgatcttcctgataataaggaagcgacagtgaaaatcaatgcctacacaggaaaggtagctaacattgtgtatgaagactgacggtttctcatcaaattctcatcttgctctcgttttcctttcatgttgagtgtgtaaactgtactcatacaaaacaaaggaggactcacaaatgctcaagaaaaaatggatggtcggtcttttagcagggtgcctagcggccggaggattcagctacaacgcgtttgccaaagaaaacaatgaaaacagacaggcttcttctaagacggatgcactcactgaacaagaagcagaagcaattgctaaaacagttgttgacggcacagtagaagacattgacagagacctttacaacggcaaagaagtctatgaagtggagattgaaaaagaaggtgaagactacgacgtttatgtagatattcgtacaaaacaagcgcttaatgacccgctaaaggagaaagcagaacaagtcgccataaccaaagaagaagctgaagaaattgctttaaagcaaacaagcggaaccgtaacagaaagtaagcttgacgaagatgacggtgcttacatctatgaaatggaaatccaaacgaagcaaggaactgagacagaatttgaaatttccgcaaaagatggacgcattatcaaacaggagatagatgactaatcaaaacccccgctgcagcgggggtttttcatgataagaaaccttcttttggacaatctaagtagaaaaggaggcgaaacgcatggaaaagaaagaggagcaatacatcaatcaggctgaatatgtccctcatccgacgaaggaaggagagtacgccttatttcttcatgaaacgtatcatttgctttctgaagatgacgagacacaaacaacagaataagggcttaggcccttgttttgttccgtaattgtgatgtaagcgcatttattacttttttgagttgacacagcttgtttttttctgtaatctcagtgtgtcaattcaattaggaacttcgttaggtgaggctcctgtatggagatacgctgctgcccaaaaatgtccaaagacgccaatgggtcaacagaaatcatcgacataaggtgatttttaatgcagctggatgcttgtcctatgccatacagtgctaaagctctacgattgaaggcgcccgcacgctttttttgccgtgcttctttcaccttcaatcccgaaggctttttttatgcctttaaaacgaaaccaatcaaaggaggtgcggagtatggattctccccattcgagtcaatctgaagaagtacccatatactatgacagcaagacaattgattacacgatgaggagacgaactgccgcaccttctggcgaggccggcacgtctccgtagaggaggtacgagtcccgatggttcaaaacatgacctatgacgaactcattttacgcatcattattttactgcgagacgggaaaatcagggatttcagaagtgttattgatgagcttcagccctatgacatggcatttatttttaaagaaatgccggaaaaacaccgcgcccgctatttatcttatttaactgtagacgatatcactgatatgatcggggagctggaacgcgaatttcagcttgtcgtcttaaataaagtcggaaaaacaaaagcaacactggcgatgaacaaaatggacaacgatgacctcgctcaattgcttgaagaaatggacgaagaactgaaggaacagcttttatccagcatggaagcgtcagagtcaaaagctgtacagctcttaatgaattacccggctgattcagcgggacgcatgatgacaaaccggtatgtgtggattcctcagcattacacggtaaaagacgcggtcgtcaaactgaaaagcttcgctgaaatagctgaatcgatcaactacttatatgttattaatgaaagcaaacagctggttggggttctttcctaccgcgatttgattctgggtgaacctgaagaaaaggtgcaggatttaatgtttacccgcgtcatatcagcagatgctcttcaggaccaggaagaagttgcccgcctgatagaacgttacgattttttggcaataccggttgtagaagaaaacaacgtgcttgtcggcattgtgacggtcgatgatattatcgacgttgttattcgggaagctgatgaggattacgaaaaatttgccgcttccggtaaagacatcacctttgacacaaaagcttacgtggcggcataccggcgcctgccatggctgattttactcttgtttatcggactgatttcaggaagcattatcagctattttgaagacgcgctgaagcaggttgtcgcgcttgcgtttttcatgccgatggtgtcagggatgacaggaaatacgggaacacaatctctcgcggttgttatcagaggtttgtctaaagaagaaatgaacaaaaaaacgattgtgcgcctgatcttccgggagttcagaacaagtatttttatcggagcggtttgttctgtgctgattgcgattgtctccatcatatggcaggggaatgcgcttttgggatttgttgtcgcctcttcactgttcttaaccttaatcatcggcacgatgtcaggaacgattatccctattattttgcacaaactgaaagtagacccggcgattgcttctggaccgctgattacaacgttaaacgatattttatctttattaatctactttggcattgccactgcattcattcactcattataaacgtaaaaagtccgtctcaactgagagccggacttttattatttaacggtttttgtaccgaaagtgagcattaagctgcccctccagcatttttttccgcacttgcggatcgttttttaacatctgttcttttttgcgcatatcctttaaaatctctgccgtctgtacgccgtcttcacgtttattggcgatatccatcagccgctctacatcagcaaaggagtattttcttgtcccccttgaagaacgctgcgggtaaatgagctttcgttcctcataatacctgatctgtcttacggacaatcctgtcaattcactcacaattccgattgaaatcacttttttgtctttataagaatgatcttctgtggtcatttttccacccctggatgtcttttgataatagtatataaaaaacaaagagaaaaaacctaacgcttgtcatattttctaacatcaaatagaagatttttgaaaaaatacggaagaaaaattaacaagaataatgcgtaacacccaagcacgttttatcctttatgtaacgaatcaaacaaggaggaaggataatcatggaggaagaaaaagcggtctcactggcaaaagaaattatagagttggatatcaagcgtgatgaaatgctggagacgtttatgcagcttgccggagaacaggcttttcaattattaagatcggttcaaaacggacaataccgaaaatcttcgtaaacataaattctttacattagattcataccacgttcatttaaaaagagtatcttttgtataggatacctcaaaatgaaggaggacgctatgagtaatttattgaaatccgctttagaaaaagaacgacgccattattctgaaaaactctatcagattggggtttataataaagaggtcatgaacaaaatgacgatttctgagcttcggaaagaatacgcttatttctttcgaagcattacaaatcataaaaattatccttatacaagataatgtataaggatttttttgcttttagaaggaatttctcgaattatagcgaatacgtatagtaagggactgaactcttattatatgtaagggttttcattatttttttataaaaatcctatatacgaggtagatatgatgagattatcgtttaacgaagaagaagttgagcgtgcgatgaatttgtacagagtttttgcaagggctttcaaaagtgtgtccgaacatagtatccgtgatagcaaagagcacggttttaatcccactgaatttgctgtactggaactcctgtacacaagaggcccgcaaaaattacagcaaattgggtcgagacttctgcttgtaagcggaaacgtcacatatgttattgacaaactagaaagaaacgggtttttagtaagggagcaggacccgaaagataaacgctctgtttacgcacatttaactgacaagggaaatgagtatttggataaaatttatccgattcatgcactgcgtattgcgagagcgttttcaggcctttcgcctgatgaacaggaccagctgatcgtcctgctcaagaaagcaggcatacacagccagcatttgctgtttcgttaactattctacactctctgtttcaggagagtgtttttttgtttcataagattctttttaaaacatcttcaatcttcctatcagacatttcgccaaggtatccattgacgtgttttttatactccttcatctgttcgttcgattgaaaaaatgccgcgatatactcttctgctttcttcatgtcccagtttctcatatctgtgacgagtttcctttcatgtagaaggtttaaattcatttcctcctgtcccggcagtgcatgataaataaataccggaagccgtttctgtaagcattcactgatggtcacgcctccgggtttagtcatgatgcctgtcgcctgttcgtacaaacggttcatctctgctttgctgtgaaggtaagaaatcgcctcgatcaaggggtggtgtaaacttttgacataggagtagagcttttcgtttctgccgcataatattttgtataagatctttccgcctggcgacagttcctgcacccattttaaaatcccaccgacccccatactgccccctgtgatgatgatggtatatggcgggtggtgctgcaaggtatctgctgattccattgcaaaatttcggtgaactggaatgccggtcaagtatatgttgttctgatcgatcccctctgatattagctgcttctttacttccgtgctcggaacaaaatggtaatcaatgttcttccgtccccataattgatttacgaaaaaatcagtgtatacattcacaaccgtcagattcggatattcaggctttaatcggttcagcagataagaaggcagcgcatgtgtgcagaaggcgatatcaggctgtttttcttggaggatgtgcctcatttgctgtgtgaacagccattcgtacatgaaatagcgtttgtcatgctggaattctccgcaggcgaggagcctgtaaatgccgctgtacgttttcgggaaatattgaatccattttaaataagccacggaggacaatttttctaaccggctatacgcatgtgaaaagatatcaatcttttcagctgccagcccttgagactctaattcagcctgcaatgcatcagccacatgatgatggccggtggaaatgcttaaaaaaggaaaaatgagaatgtttttcatgacagtcctcctaaaaaaatatggcaactatattttgaggagaacgttcacaaaatataagggtgtttttgatcataaggaaggtgaaaagatgaaaacttgtttcctttccatatggagagtggttgacccgatttatttctttttttcaaggctaagcttgattgacaacgatcaaaaaagcgtttttcgagtcaggctgacgaagtataaaggacatcatgtcgtgcttagcgatggaacgcatattagaaaaaatgatgtgctcgttaaaattcatctgcataacataaagctgatcagggagcttcaaagcattgagagcgcagtcagaaagggaatcattatttatcagaaagtatatcaatcgatgccgcttcttcttgactatatcaacaatcataaaaaaagcgagaaaatcaaaggaatcattgggattacaatgcttgacaaaggtgtggaaaggctcggctttgatgtgatcaccccggtgaatcctttttacagatgctttaaaaaagtgtcccatgtgccgattttatatttgacttcaaagcctgtgagcttgcggcatttaccgaattcatcctatttgtttatctcaaaagaaaagctgcagaaaacctatcaaaaaaaagactgatgcctcggtcagcacagtcttttttgattaaatctgatgaaatgtcacttcagggcggcttccaacacggatatttacgccggtttgtcccaagccctcgctgatataaaatggtttatcgtgatgataatgaaggcctttaatcatgttcattcgcacgagcttgcccattttcaccaaatgatacggttttggccagtgaatttgcccgccgtgaaaatgccctgacagcaggtaatcataatgaacatctttcatatccagaataatatttgggtcatgtgttaagacaagatgatagccattttccagactttgataagagccggtgatattactccgattcgtactgtaatcatcaatgccgataatattgactggccctgcagccgtctcgattcgaacatgttcattttgcagcgtgatacagccgttttcctctaaaactcgcttcaatctctgaaagtcctcttcttttaatacataatcgtggttaccgaacaccgcgtacattccatatgcaggcttcagcttttgcaaggcgttcaagtaacctgccagcttcggaatattacgtttccgatcaagaaaatccccggtaagagcaatgatgtccacaggctgatcttttgttaaatgatacagctcctcaggtgagacagaaatgttttccaagtgaagatctgataaatgaaggatatttaatttttttctggctggaaggccgtctttttggtcgattgaaatggtgttgactttcacatcttttgtattgcggttcgctttatatagaaatggcacaaatacgagtatggccaatgaaagtaagattgtaaacaaaatatatcccctcccttctatcagtatagtaagtgatcaagccctatggatagcgggaattaatgggtagagacaggttgaaaaacggattgtcatatgatgaatgatttggaagggaaaagggataataaattttgacacatgaggcagaacatgccgacggagtcagaataacaaatggatgtgtaagcaatgttacgattgatgagacaacaaaaaaaagaaacatattatctctggatcgcattatttcttcttttattgtatgtatccccgctttttattttaaaggaagatgcccatatccgggtccacgataatttagattccaacatcgcttggtacaaggttctggccgatagcggagaaatcgtcggcaaggttgacgctgccattccgcaaatcattaacgggctgccccgggatgcctttggcaccgagtggagcggaattgtttggctccatgctttcttttcttccatgaccgcctatgcaataagccagacggttacaagagttgtcgctttttttggaatgtatgtgctgctgaagaaacatataatcccggaaccaaaagcggctttcatccgaattggcgtatcgcttgcatttgccttaacaccgttctggccttcgggaatgctgagtacgcttgggtaccctttggcactgtgggcttttttaaatatccgaaaaggggatatctcatggagagagtggctgacgctgggcttgctccctctatactcaagctttgttctaggtttcttctttttcctggcagggatggcgtgtttttggctgtatgatgccattacaaaaagaagatggaatttgatgttcttaggcagtattgcatttatgacgagtatctatcttttcgttgaatatcggcttgtctattcgatgctgtttgagcacgcaccgatgcatcgtatcgaatttatctcatccaggcatgacgtttggcattctcttcggctatccgtaaaaaactttgtctatggccataatcatgtgatgaccgttcataccgttgtcatccttccgatcctgctggtcgtatttgctgctctgctgttcaaacgaaatcggacaaagccagaaaatgtgtatctgtttttatgtgtgcttaattacggattgtcattatggtatgcgttttggttcaacaaaatttgggctgttccaaagcagaaatttgcctttttagcagaatttaattttgcccgttttcattttcttcggccgcttgttatatacgtgagctttgcgcttgctttatatctcatttggcggatggggaaaggatggaaatggcttgtgtacgccgcagtcgctgcacagctgatggtgttggcgccttttaatgaagaatatacgtatggcgttcattacaacgcgccgacattcaaggagttttatgcatcggagcaattcaaagagattaaggaatatatcggacgtccgcaggattcgtacagggtggcgagcatcggactgcatccgtctattgcccaatataacgggttttatacgttagatacgtataacaatctgtatccgctttcatataaatatgaatttaggaaaatcatcgaaaaagagctggaaaaaaattctcggctgaaacaatactttgatgaatggggcagccgctgctacctttttgtcgatgaactcggtaaacgatatgatttcaaaaagaactcgaagaaaacgatcaacaaccttcaattaaatacagatgtatttaaaaaaatgggcggacggtacattttttcttctgttccgatcatgaatgctgaacaaaaccatctcgcgctcgtaaagacgtttgaccataaagattccgcctggcgcatttatttatatgaaacaagataaggaggatatcgattgaaacagtcacagccagtattaaccatcgtcgtcccgtgtttcaatgaagaggaagtgtttcaagaaacaagccgtcagctgacagaggttgtagatgatttaattgaagaaaaattaattgctgaagacagtaaaattctgtttgtcgatgatggcagcaaagaccgcacttgggctttgattgctatggagagcataagaaacaagaaggttaccggcttaaaattagcctgcaatgtcggccaccaaaaagcgcttttagccggactgcataaagcgaagaataggtcagactgcgtcatttcaatcgatgctgatcttcaggacgacatctctgtgatccgggattttatgctgaaatatcatgagggctgcgagatcgtttacggtgtacgccggagcagaaaaaccgatacctttttcaagcgcacgaccgcgttagggttttatcgtctcatgaataagcttgggattaaattaatttataatcatgctgattttcgtttaatgaataaaaggtccctcgaagagcttgagcgttatccggaagcgaatctgtttttaagaggtattgtccccatgatcggctttaaatcggccgaagttttgtatgaccgcaaggaacgctttgccggcaaaacgaaatatccgctgaaaaagatgctatccttcgcttttaacgggattacttcattcagtgtcgcaccaattcgattctttacgcttttagggtttgttttgtttttcctcagcgctgtggcagggattggcgcgtttattcaaaagctgctcggccatacgaatgcaggctgggcgtctcttatcatatccatttggtttttgggcgggctgcaattgatgggaattggaatcatcggagagtatattggaacaattttttctgaagtgaaaagacggccgaaatacgcgatcgatattgatttgtataatgaacagctgagcccgcttcagcgccaggaaaaagagcggttagaaaaaaagtacagttaaacacggaaagagctgacttcattagtcagctctttttcttcaactgatgcaatatagcgctaagcggttcgtcttgcgggttgcggtaaaaatcaaaaaatgggcagccctgcttcttaattcgatcgatgaccgtatcaattgtaaaaagagcgggtgttaaagatgattgcacctcatgccagtagagcggggctgcaacagtcccaagctcatttcctctcgtcgaatagggacagataatcgtttttccttctgcatgctgcaaataatcaagatacaatttgccgtgtctgtttttaatcaagcgttcagtggtaaagagctcgggaaatgcattggtgcagtactctgcgatcagctgcgtaaattggcgtgtttcttcatacgtaaatgcctcgggagacaagggaatataaagctggattcctttgttgccggacagcttcgggtacgatgtgatgccaaaggaatccaacagccgcttcagttcatttgcggcctgcacggccataagaaagtcatctcgcgaaggcgggtctaaatcaatgacaatctcagccggacgcctgcttttaatggtttgaaaaggaacgtgaaactccaaagcaagctggttgcaaagccatagcaatgtagacatatcctcacagacaatatgttcatggcttccatcatagaaggactgaacaaaatccggcgcatagtccggcttgtttttttggaaaaatgattcgctcctagatccatgcggatagcggatgacggtgacagcccggtttttcagaaatgggagcaggtagtcactgacttcaatcatatactgaataaaatcttcttttgtttttttattcttttcaaatatgattttatccaggcttgtgaactggagttttgggtgaaccggtttggagtgtcgtatgacttgcgcatacgtgcattcggtccagtccatttggaattcgaaaccgataaacgatacctctcttaatgtgccatggagaattgttaagtattgaacagctgcacaaatcgaaggttcaagcttaaactcgcctgagggtgtttgatgtccgtgctgttccataatctcgcgtatagcgcttttttcctcatcgcgcattccgtgcgagacagaggcaatcggtgtcattattccgttttttaacaccgataccgtcagaaacccgttgttagggttgaaccctgttatgcaaacataagcttgtttaaagtttttatatttgagccaatcggacgaccgcttcttttcaagccatttgctgtttgttttcttcgctacaattccttctccgtcatattttattaccatctcccagagttgatcaaaatgatcataacagggaatggattgaatggtttcttttgcgtaaggatctggagatgcaggaagctttgctgcggatatgagttcacgcagcgattttttgcggtccaaatacgaaagaagcgttacatcttctccgcttcgctctaacaaatcaaaggcgagaaagcagcacgaccgcgcgtttgccgattcctgaatcttgtctggccttttcaaacgcccccgcacttgaaggtgttcaaaatctgcacgacagggattcaccaaacatacgatttcaccgtcaagtgtcagcggaagctctttttctaggtgctgaaaggcagttttggcgaattgtatgatttcagggaaggtgctgctgagctccacaccatttctgctggttaaggtcacacctgaagaatggatgcggagaatacagcggtacccatcatattttacttcgtaacgccattctgctccgattggcggtgacgaagttaagaccggctgcatggtaaacgccatgcgctatgatgtgccggaggctttttttctagttgttttttgttttttatctccggctcctttcggttcagcggcttgtgcaggtgcggcagccggtgtctcccggttcggccttctggttctgtcgatgctggcttgcagagcgcttaccaggtcaatgacatcttcacgaggtggcgctttatcaggagtgacagccgtttctttattttctagcttgtcgttgactctttgcagcagcgcctgtcggtacgtgtcttcatatttctcaggctcaaacttagcagtcagttcatctattaatgtgatagcagtttgcagttccttatcgtttacattcgattgatcatgtacacctgggacttgagcggcgcttctgacctcatcgggataatggatagactccatgacgatacaattttcataaacgcggagaatcgccagctgctgctttgacctgattgtcatattggcgataccgatctttccggttgagcgcagcgcctcacgcagcagggtataggccttcgtcccattatccccggggccgacaaagtaggagcggttaaaataaatcggatcaatttcctgaagctgaacaaagtcaacaatctcaactgctttctcctcatgctcctgttttaagctttttaaatcttcgtctgtcagcactacatattttccttttacatattcatatcccttcacaatttcatcaggactaagagttttttcgcaatttgtgcaaactttctcgtatttgattggtgcgtgatcctctttatggaggctgcgcagtttaatatctttatcttctgtggccgcatatagcttgatggggatgtttactaatccgaagctgatcgatcccttccacattgtatgcatatcgataaacccctttttttctttagtgtgaagagaaggagtacgattcatgtgtagtaacttatgggtgaaaaaaagccggcgctgttattgcgacggctgttcaataatgaattgttcgaattgttccggaggtattggcctgctgaaaaagaagccctgcaaatggtcgcagcctttttcaaaaagaagctgcttttgagctgcattttccacaccttcggcaatcacctgcaaagacagctgatgccccatggcaataatagctccggtaatttgctctgatttaggatgggtctgaatatcgtcaataaatgatttgtcaatcttcagcctgtgaatcgggaagtccttcaaatagctaagagagctgtgaccagtaccgaaatcgtcaatactgattctgattcctaattctgttagggatgacaaaacctttttggagtgatcgagattgtccattgtcatgctttccgtcacctccacttcaagaagctgcggaggaagctggtatttattaagcgtatccttgatgaggggaatcagatctttagattgaaactgtctggcggaaatattaatggcgacagaaagatcatagcctttgtcatgccaaatccttgcctgcttgcatgcttcatctataatccactttccgatatcaataataagtcccgtttcttctgcaacaccgatgaattctccgggcggacgcagttgcccgtctggtgtcacaaggcgtatcagtgcttctgctcctgtcattttttgttttttcacactgaattgcggctgataatgcaagacaaatctatcgttttcgattgcttctctgagtaccatctcttggttaagcttaacggtttctttgttgccgattgaaaaagaatagtatctgtatttgcttttgtttcgttctttagccgcatacatcgccatatcagcctttttcatcaattcaaggccatccgtcccgtcttttggagatatcgcaatcccgatactgacagatgtgacaagggtgtgatcttgaattttgaaaggttttttgaatttttggataatttttcttgctaaaacatctgcttcgcctgttcctgtattggcgtctgttaatataataataaattcatcaccgccaagacgggcgataaatccgttatcagggactacagatgacaggcgtttagctgcaaactgaagcaattgatcaccgacattatgccctaatgcatcgttaatcactttaaaccggtttaagtcaagaaagaatacaacagtgttataatgcaaggaatgctcgcgattcagcacctttgttagatgagagatggcatgccttctgttaggtaagtctgtaagcgaatcataatgagccattctatggatttctttttctgctttgtactgcttcgtcatgtctttacaaatgacataaatgctgtctagttcctgattgacctcaacaggtataagcgtaatatttaagtgaaactggcctttttcagtgataagatcgctatcgctgttcatcgcttgtttatcttttttaacttgctcaaaaaggcgcttaaccttcagtgatgtgtaattcctccagtcatgcatgctgaagccaaatttgctgatcatttcctcaccagcgtgattggaagatattatgtctccttctaatgataaaataaaaattgcatcaatattgtggacgattaaagactgaaatcgctgttcgttatcctttatgcgttcgctctgtttaataaactttcgatctgcatgggaactgaataacaataacgtttggatacaaaaaataattaaagtaacaaaaattgaccaatgaaacgtttgcacctccatatggcttccgggcggagccatgtccttatggaaagttgccgcaagcatccctgtgtagtgcatgcccgaaatcccaatgcccattacaattgaactgacgactttatagaatataagatgctcagaatgtttttttacggccaagtcaaagaatatttttaacgagacgaaagaggctgcaatcgcaatgataattgaaactgtaaataaaatcggttcgtaaataatcattacccgggaaatggcagacattccgatatagtgcatagaagcaatagatgcgccaagcacaactgatccggtaagcagtctgtaatatgtaagaatgtgccggctgacaaaatataatgacacaaatgatcccgaaacagatgcgccaatggctgccattaaaggcatgaattcatattccatcggcatttccatatggacggccatcatccctacaaaatgcattgaccaaataccgaatcccataataagtgagccgccgatcagccaaattttactttttaagcctgtattgatggtgactttccttgaaagttcaagggaaatatacgaggcggtacaggcaattagaatagataaacatatgagagtcgtattatatgtaacgtgtatttccaaatggagattccccccgtatcgtgtgttccagtcttgttgactctctttattatcggctgcttaaccgcagagtttcagccttcaaaacgatagaaatacgagggagatctatttttagttcaactgaccgtgaaaaatgtgttaaaatcatcttgacgttttccgaaaaaacaaaaatgtataatacataaacatgaaacaagggagttggtggctatcgaagagctggttatgtcatggatagaagcatttaaaagcttatcttattttggaatatttctagcgctcagtattgagtttatcccggccgaagtcgtcttgccgcttgcgggctattgggtatctaaaggcgatatgacacttgccggcgttgttttggcaggatcgcttggaggagtggccggtccgcttacgctgtattggataggccggtacggaggaaggccgtttcttgaacgttttgggaagtatctctttattaaacctgaagcgcttgataagtcagataaatttttcaaaaaacatggtggctttgtcgcgttcagcggccgtttcttgcctggcatcaggacattgatttccataccgtgcggaattgcaaaaatgaatgtttgggtgttttcgctttatacattcattgctatgcttccgattacatttgtatatgtttatctcggtgtgaagctcggtgaaaattggaaggaagtcggctctattcttgatcaatatatgcttccgatcgggatagccattttggcgcttttcctgctctacttactgatgaaaaagaggaagaaacgcacgcactccgaacaattatctgtatttttgaaaaataaacgttgacaaatcattgcgctgcgcatatcattgacgtataaaatcatatttcttgaaatcccaaaggggagtagcgtccggaatgtattccggaaacaaagtcgtcatttcatggattgtatccatcggctttgttggcatgcctgaattcatgtctagcaagacctttgccttatgtcggcaaaggtcttttttgcatggtccggccggcataagatcggatgaagagaaagaaaacaacttttttgggagggtatcatttatggatgcagcattattattagagtatggttgggttcttctcgtcttgatcgggctggaagggattttagccgccgataacgcgctggttatggcggtaatggtaaaacatttgccggaggaaaaaagaaaaaaagcgttattttatggattggcaggggcttttgttctgcgatttggctctttatttgcaatttctttcttggtcaacgtatggcaggttcaagcgattggcgcgatctatttgctgtatatctcagcaagccacttattgaaaagatatgtatttaagaaagaagacacacataaagagacgaagcaaagcggtttttggccgactgttttaaaagttgagctggcagatatcgcgtttgctgttgattccatcttagcagcagtagcgctggcggttacacttcctgggacatcactcccgaagatcggcggacttgacggaggacaatttctcgtcattttggccggcggtatcatcggactggtgatcatgcggtttgcggcttccatgtttgtgaagttattaaaggaacgtccaagcctagaaacagcagcctttgtgattgtcggctgggtcggagtgaagcttgctttatatacgcttgcccatcgcgacatagcggttgtttctgagcactttattcattctggaacatggaagctgatattctggggtgtcttagcagcaatcgcggtttgcggctggtttatgtcaggtgggaaaaaacagccggagggcgcacaaaacgaacaaagaaacagcacccgtgaacgggcgtaatctgaaagactctgcttaaaagcagagtctttttgtgtttgaagcgttttcataagcgaaataaaataacatttttataacatctttgttacaaaaaacacgcataaaacccccttaattctttagaaaggcacgaaatcatgtataggacgtcagaatggtttgtcataattgagacattggaaatcaatatttctttttctcctttgcgaatccctatcaaattagctatcattaatgagtagttatagggaggaactgaggtgaaaccagtgcttagccttttgtttaaattgggaaaaaagaagcaaacacttgaaaaagctgttgagagtatacaaaaaggcaataaagatctgcaaaatgaattaatacagcaatataagccatttatcgcaaagacggtttcatccgtttgtaaacgatatatagatgaaaaagacgatgagttcagtattggactgatcgcgtttaatgaagctatagaaaaatattcacctgaaaaaggaaattctctgctcgcatttgctgagcttattataaaaagaaaagtcattgattacattagaaaagaagccagaagcgcacaaaatataaatatcgatttacaggaaggagacgatcaggagtcatcacaaagcctgattgaagccgagctttccattgatgaataccgccgtcagattgaacaggagcagaggcgggaggaaatcctctattttcaaaagcagctcaaggattatggtttatcgtttaaagaactgcttgaaaattctccaaagcacacggatgcaaggcaaaacgccataaaggtggcaatgacgcttgttgaacatgaagaattggccgctatcctgtatacaaagaagcagcttccggtcaaacagcttgaacagcttgtctctgtaagccgaaaaacgattgagagaaacagaaaatatattattgcgatgtgtattatcattacgggtgattatatttatttaaaagattatcttaaaggggtgctgcactcatgagaagagggattatagtagagaaaaataaaaaattcgtcacgttgctgacccctgacggacaatttttaaaagccaaaaatgatcgacacagctatgaaatcggagaagaaatcatgcttccgagtgaaacacgcatgggcagaagggccagcttttttgatttttttaaactgcgccctttcaaaatggggatttttacgatgactgctattatgctctttatttttatagttctccccgttttttctaataataaggcctatgcgtatatgacaatcgatatcaatccaagcgtcgaaatggcgttaaacagcgattatgaagtgattgaactgacgcctctaaacgatgagggacagaaagtcgtgaatgatatagatgattgggagaagactgattttaaaaaggtgattgacgatattataaccgactgcagtgaacacgggtatgtaaaaaaatcgaaagaaatattgatttccactgtttatgaaaacacagaagacaatacatataaaaaggctgtgaaaaaacagctgaatgatgtgactgaaaaatataaaacgacataccgcatggaatctctcgagtcagatatgcaaacgagggaaaaagcgaagaaagaaggcgtctcaacaggcagctacatcaaatcaaatgaaaagaatgacaataaagatataaaagatgactccagcaaaccatccggggaagaggatcaaaagagtgatgaaaatgaggatgaaaacaccgatcaaactgacacccaggacagcaagcaaggagataatgaacagctgaatgatgcggattccggagaccagaaagaagagaaagcggatgaccagattgatgatagtgacaaagataaaaaaataaaggaatcagatgaaaacacaaataccgaaaaagatggggaccatgagcaaaccccaatacaagatcctcaagataaaggaaatgaaaataacggcgttgacaagggccaaagccaatatcacagggactggaacaatggtgaacaaggcaagaaccgttcttcgtccagaagggataacgcttcagaccgacgtaatccaaacggctacagcagtgataatcattcagctaaaaatgaagattcgccgagtgcccccggcgaataaagacctgaatttatttagttgtgccatttaattgtgattgtgcttgctgtaccagccgctttgtcatttctccgcctacagagccgttagcgcgtgcgactgtatcagaaccaaggttcacaccgaattcttgagccacttcgagtttaaattggtcaagtgcctgctccacccctggaacaacgagtttatttctgctcgccatctttttcatctcctttttcgataaagaaattcttaacgcgtatttagtttgaaatatacggggtttatttatgctggcaattgttgtggagaaaaataaaaccccggcctctgagccggggtggcgcagactatagaatgtctgctgtcattttatgtgcggttgcctgaatatggaatgtcaaaatggagaggactgtaatggcgataatctgtctgattttaagccattggctgtcattcagttcttcaaaacggtgacggagacgctctgtctcctgttcggcgatctcctgcagatttgattctttcatagaaggagtatcttggtgatggatggcatcaagcacatatgcgcagctttcataataagcaatcgggctgatgacatcatcagatctgtctgagattgtgttaaaggccacttttaaaatagctcgtatgtgttcaaagtcataaatggattttaaatcacgtacaattaaaagaataactgcctgttcaattgagtattttttgcctagctcagggtgtccgatcagatctttgatatcacgctttacccagttttgaatcgcggttgactttaacgaagtcagctcgcataagttgccaagctctacgatttcatttgtagacagtccgtattcttttttctgtttttttcgttcatatcttgtaagaaattcaggaatttctagatgattggctgctttttctgctgacatgttcgctgattggacgagaatgtcgagcgggctatgttctccttgtccttttagggaatagagcagccgcaccatatcggttcgagagagtttaaaaatgttcattgttcacctctttaaacaatttgacgcggatataggtctatgtataagttcaaaattcaagcgtcagcaaattacattaacatcatacgtcgaattccttgcattttcaaatggatgttttataatttaaatatacgggttcttttgaacttaaaataacggaggttgttatggcgaaaagaatttttctgtttattctaacgaatattttggtgcttacaacaatcgggatcgttttgtctgttttaagctctgttacaggagtcgggacgtactttacagctgatggcggtatcgatccaatggcgcttcttgtgttcagtttagtcgttggatttgtcggttcctttacgtctcttgcgatatccagatggatggcaaagacgatgatgggcgtcagagtgctgaatccgaaaaaacactcgctcagctatgaggaacagcaattggttgatcgtgttcacagattaagccgctctgccggtttaacgaaaatgccggaagtcgggatttaccgttcacctgaagtaaacgcgtttgcgactggaccgtcaaaacgccgttcacttgtcgcagtatcgtcagggctgctggagcagatggatgacgcagcagttgaaggtgtgcttgcccacgaggtcgcgcatattacaaatggtgatatggtaacaatgacgcttttacaaggcatcgttaatacctttgtcttctttttatcgcgtatcgccgcttggatagcaagccgttttgtcaaagaagatctagcgccgatcgttcattttattgcaataattatttttcagattgtcttttcgatacttggcagcctggttgtgtttgcgtattcacgccatcgtgaattccatgctgacaggggaggagcggatcttgccggcaaggacaagatgattcatgcgctacggacgcttaaaagctattcttcccggattatggaagacgatcagacagctgtccaaacgttaaagattaatggcaagaagcgctcttcgcttttctctactcaccctgatttagatgagcgaatcaggcggctggaagctaaataatacaaacacattgttcctctgagagaattctcagaggttttttattttatccattgactaaaatcataaaaaaataagcaagttaagaaaatgtttcgtaaaagcctttaaaaatggacctaatatctttagaataattaccgtacttaaaaagagaggcagaaggattttacatgagattaaagtttggaaaattgatacaggccttgtcaccggcccagctgatcgcattatattattttcttgcagttactgtggccgttatattgctgagtttgccggcggcccataaaccgggggcggattggacgtttattgatgcgctttttacagctgtcagttcagtcagtgtaacagggctgacagttgttgatacagctgatacattcagcacaatagggatttttatattagcatttgttctgcaatttggcggaatcggaattatgacgctcggaacattcatttggctgatcatgggaaaacgtatcgggctgaaagaacggaagctgatcatggttgatcaaaaccaatcccagttttcaggaattgtcaatctgatgaagcaggtactgtttctgatcttgtggattgaattttttggcgggctgattctcggcacatatttcttaacctactatgactcctatcaggaagcttatttacacggattttttgccagtatcagtgcaacgacaaacggcggatttgatattaccggtaattcgatgattccatttcgccacgattactttgtgcagtttattacaatgcttttaattatatttggagcgattggatttcccgtgcttgttgaagtaaaggatttcctgttttcaaagcatcggcgttatccatttacgctttttacaaagatcacgacgattacgttcggctcacttgtcttgtttggagccattggcatctttgccctggaagcaaaccatgcgttcgcaggaaaatcatggcatgatattttgtttttgtccctgtttcaatcaacggcaacccgaagcgggggactggcaacaatcgatatcagccaattatcagattccacactcttttttatttgtgcgctgatgtttatcggagcgtcgccaagctcagtcgggggaggcatacggacaacgacttttgctttgaaccttcttgcgctgtttcattttgcccgcggcaataaggccgtaaaggtattcaaacgggagcttcaccctgctgacttgatgaagtcgcttgttgtcacgatgatggcgatcctgctcgtttttggcgcgacactcattctgaccattacagaaaaacattccctgctggagcttttgtttgaagtgtgctcggcattcggtacaaccggcctgtcgcttggaattacggcagatttgagcagtgttggaaaatgcgtcattatgattgtcatgtttatcgggcgaatcggcatcctaaccttcctgtatctgatcggaagaaaggaaattgaagcgaactatcactatccgaaagaaagagtgattatcggataggcaaaacaccgcatactttgcggtgttttttgattgccaaaaaaaagatgtgtgcctcctgttcagttggagaacctaacttcgacaggtgcaatttacgctcctgcatcttaaaatgtctgaaaactggcgaggaggattcgtatgaagcgtaaagctgaagtgaatgaagccattaaaaataacaatacacctaccgagagcatggaccccaattcatataagacacaatatcatgacgaccccaattttagaggggcaaaccgcaattccaaacagggccagcagggaggcatgtagttgtgaagaaaaaccgtcatagcagagacatgcaaaatcataaaaagcctatgaataaaaaggtgctggaggaagagttctcaagtgaacttggggattacaatgccgggaagatcatcgaaacgctggaagtcaccaagcctgaaaagaaaaaagaaaaaaacaaaaataaaaaacaaaaataaaaaagacctcttaggcggcgtccgcttaagaggtgctttttctattttaaataagcatttttgcccgttcctctgacaaattgcaataagctggtcatcctcagctcaatgaagggctgagcgactgtcttaacaaagttgctggagaggactgatgtcagggctgctgttaaaagcaagaggatcactaagctttgatagtcagtaagccaatcctcaagcccgacctgtcgtaatgtcttaataataaacccgtgaagcagatacacgtaaaatgtccgggttccccatttggtaaagaaataccgtttttgcggaacaagcgctaaaaagctgaaggttgccccaaaggcgagtacataccagccgattcgggatagtccgcttaccagggtaacgtctccaaatgaagaatacggttttgaaccaaacagaaaagaatagtcaaaatcgatgccccagcagatgacgaatactgcggcaagcactccgagcgcaatttgtttgccgcgttttgatctcaataaatcaaaatgatgtttatttaaataaaaaccgacaaggaacatcggtaagaatacgaatgtccgtgacaagctcagcgtgctgctgacaaagtccagataaccgatcagcacggcgattccgcagctgacaaacagcgcccactgctttgaaagctttgaaaaaggatataggagcaggttccaaaagaataagcttacaagaaaccataacgaccattgcggatcaatcgggttcacatttgccatgctttcatcttgcataatgtaataaaagacggaataaatgatttggaaaatcaaatacggaataatcagcttgaccgccagcttttttacatatcccgcccgtttaaagcctttcgcgaaataaccggatacaagaataaatgcaggcatatggaatgtgtaaatgaacttgtagaggtagagcataaaatgattatcattaataaaggaacgaaggatatgaccgaatacaacaaggaatatcaataaaaattttgcgttatcgaaataactgtcccgcgatttactcatagcatcaccttctctttcatcagtcactaagagattattccctgctggtacatattttaaaataaaagatgaaaaaggaatctaaaaaaatgctgattgttaggtcgatgtaaagtgatggtaaggatcgtagaaaatgtcttcgtaatgtaatggcgctgaaattttctgaaatttatagggcaaatgaaggaagttcccgcattttgtagaaatattgagggataggttttgaagaaggagtgtacatgcatggaaactcttggtgtccagacaaactcggagctgcgagaggaactgaatcgcctcaaagaagaaaacgcgcgactgaaaaaggaattgaatcagcatcaagtgattgtcaacaatacgctcgatgctatttttatttgtgataacgaaatgcggattgttcaggcaaatgaagcaacagaaaggatgcttcaagttgactcggaggatttgaaaaagcgttctgttttggattttttgttttcaatcccaaaggatgaactgaatctttccgtaaagaagttttttaaaaaaggctttctgtggaaggaggttccgatcaggcttgattgcggggcaacaaaatacatagagtttctggccaaaagaggtattggcgaggatttcttttttgttgtcatgagggacatatcttctaagaagattctggagcgggaattctctatgaatgaacagctttttaaggacttgtttgacagagcagttgacggaatcgtcctgtttgataaagatggcggttttattgatgccaatttgtccttttgtaaaagctttgaaatcaatcataatgagctgtctcatttatcgttgtatgagttcatagacagcggctcacgaaaagatttcgacaatatctggaaggcgctcaaccgcaagggaaaagcgaagggggagctgcctgtcaagcttcgttcaggagttcaaaaactatttgaattcacgattacatcaaacatcatcagcggtttttatatgtccattatgagggatatcacagagaagcggtctatggagctacagctctttaaaagtgaggagcgcttcagagaaatctttgaaaatgcaatggacgccatcatcatctggtcgaatgacggaagaatcgtaaaagcgaatcaatcagcctgtaaaatttttgagctgccgatgaatttgctgttgaaaagaaagctgtgtgattttctcgttgactcgcagcagaaatacagcataacgaagaggaaatacgcaaaatacggagagatcagagaagagctgctgtttcaaatggggaacggccaattcaaagagcttgaatttacttcaaaacggacaatccttgaaaatcagcatttgacgatcttaagaaatgtaagcgacagaaagcggatggaaaaggagcttcgggaaagcgagctgaaattcagaaaagtgttcaacggctcaatggacggcaatgtattgttcgacaatcaatacaggatcattgacgccaacccgttagcaagccatattttgggactgtcacatgaagagataaaacagcacagcttgttagatattatttctgcttatgaaatagaaaatctggcatcaccggcaaggcagattaattttgatgaaatggacaacgaaattccatttttgctgagcagcggtgataacagaaaactcgaattctcatttaaacggaatattattcaaaatatgaacttggctatctttaaagacgtaacagagcgaaaagaattggaggaacgcctgcgcaaatcagatacccttcatgttgtcggcgaactcgcagccggcattgctcatgaaatcagaaatccgatgactgctcttaaaggcttcattcagcttctgaaagggagtgtcgagggagactacgccctttacttcaacgtgatcacctcagaactaaagcgcatcgaatccatcatcaccgaattcttgattttagctaagccccaagccattatgtatgaggaaaaacatgttacccaaattatgagggacacgatagaccttctaaatgcgcaagccaatctcagcaatgtacaaatgcaacttgatttaattgacgacattcccccgatttactgtgaaccgaatcagctgaaacaggtttttatcaatatattaaaaaacgccatcgaagtgatgcctgacggcggaaatatttttgtaacgataagggcattggatcaagatcatgttcttatctccttaaaagacgagggaatcggaatgacagaagataaattaaagcgccttggtgaaccattttatacgacaaaggaacggggaactggacttgggcttatggtaagctataaaattattgaagaacatcaaggcgagattatggtagaaagtgaagaagggaagggcaccgtttttcatattacgcttcctgtcagacagaatgctgaagaaagaaggaatgatgaatgaactactatacgacagccgagacgccgctcggtgaacttatcattgccgaagaggaggaccggatcactcgtctatttctcagtcaggaagattgggtggattggaaagaaacggttcagaatactgagcacaaggaaacacctaatcttgcagaagcgaaacaacagcttcaagaatatttcgcaggcgaaaggaagacattctccctgccgctcagccaaaagggcactccttttcagcaaaaagtgtggcaggcgctggagaggattccatatggcgaatcccgaagctatgcggatattgccgctgcggtcggcagtccgaaagcggtgcgcgctgtcgggcaggctaataaacgtaacgacctgccgatttttgtcccgtgccacagagtgatcggcaaaaacagtgcgttaacaggatacgccggaagcaaaacggagatcaaagcatttttgctaaacatcgagcgaatctcctataaagaaaaataaaacatatggcacgttcccttttttcacggccgacatatcattttattaagttaaaaaagttggtctgatgaaaaaggaggacaaagcaattgaagccgagccgctctgagaaacttgccgtttttgccgaactgtttgtgaaactgcatatcttatcaagcgctcaaaaagatgaaatcatcaatgttaacaaaaagaaacaaaaaaaccgctgactcggctccaaatgagcaaagtccagcggttttttaatgcaccttttctcctctaaacagctgttcaatctcttcttcatagtttccggtcataatccctttttctgtgatgattcctgaaatgagatcatgaggtgtaatgtcgaaagcgggattaaagacaggcacattggatggagcggtccgaactccggaaatctgcctgacttcctcgggatcgcgttcctctatcgggatatcagcgccgcattcgacctttgtatcaaatgtagataaaggtgcggcgacaaaaaacggaatatcaaaggcgtttgctaaaatagcaagaccgtatgtgccgattttatttgccgtatcaccgttctttgcaattcggtcggctccgacaataacagcggaaatttgtttttccttcatcgtatgggcagccatgctgtctgtgattagagtgacatcaatgcccccctgcatcagctcccaagcagtaaggcgtgaaccttgcaggacaggccttgtttcacaggcataaatgtgtaatcccaaatctttttgtttggccaagtaaaacggagctagcgccgttccatagcggcttgtcgcgattgagccggcattgcagattgtcatgatcctgtcgccttttttgaaaagctgcagggcgttttggccgatcaaccggcacgtttcctcatcctcgacctgaatctgaatggcttcatggacaaggtttgtttttgcttcatttacggaaatcgcgttttcgaccgaatgactcagtctctcaagcgcccatgacaaattaatggcggtaggccgtgagctgtttaaatattgtttgatgtcttccagtctgcggcggaattccgtgacattatctgtttcaatgtttttggcagcaagcgccagtccgaaggcagccgtaatgccgatcgccggagcgccccttactttgagcgtgacaatcgcatcaaatacatcctctttcgtcgtcagctccaaatattccgtctcatcaggaagcttttgctgatttaaaatggtaatagctgtttctttccattcaacagaacgtggaacagcaaatgaatgggtcatgaatagatcattcctttacaagtaacttaaataattcaataacatctgttatcgttttgaattccgaacgtttttcgataaaggctgtgccggtttcgagcgccaagcgttttctgccgattcgtttatcaaacggcacgatcgtatccaggtcagctacatgggcaaggccgatcgtgcgtcgtatcagctcacagcccgcaaatccgattgcttcttcaaaaatatggctgagcgtatcagtgaggtaaccgtcgatgttggcgtaaacatccagactgtccttctgccaggattcactaaacgtctcttcaaacgtttcccagacctttttgacatgttcatataacggctctctgtcagccccgtcacggctgagtgcgttcaaaaataagttggcgataaattgccctacatcaaagccgatcggtccgtaaaaagcaaactcaggatcaatcacctttgtttcgtgctcacttgcgaaaatgcttcctgtatgcaaatcaccatgaatcaacgtttctgcagacgttaaaaatgactttttcagcttagcggcttcgattttaacgctgtcattattccaaagcttttcgacaaaaggacgaagctcttcttcaaaatcatttgtgtcatggtcgaagaaaggatctgtaaaaacaagtctttccgtaatgtcgcatagctctggatttgtaaactgtttaacaagctgttttttcaccttaggttcaagcgcgtaatctgatgagtagaaaagtgtttttcctaaaaattcaccgatgtgctgcgacagatgaggatagttttcacccttaatgagtccttttcttgcgatcttgaggtgagagagatcctccatgacggtaaccgccatttccgtatcagaataaaacactcttggaaccaggtgaggcacatgctcgccctgacggatgagagcgctgctttcgattcttgcacggtcgattgtcagcggccagctttctcccaccacttttgcatacggaaccgcctgtttaatgattaatgctctgtcatgttcttgatcataaatatgaaaaacgtaatttaagttgccgtctccgatctcctggcatgtcagcgtgcttttgcttggaaaaaggccaagcttcaccgccaacgccacagcggagctttcatttaacgtttcgtataaaggtgtttttgtgactcccatcatcataacctccaattatgtaatcacttaatatgtagccgtaaaaaagcctccttctcagagagaaggaggcttaacagtctatgtccgcctctcttatctctcagatcagatctgaatggaattagcaccgtgccttaagagaccagcgtctcggcgcgaaaaagatgcgccccatttcacaatggaattacggtcggttgctgttggggtcaaaaggccaaatccctcgcccaactctcgataagagaatatattcacttgtttgacaattctaatttatcagttgatgaacatggtaacaggtaatttagttagttgtcaatattttttaatataaatcttttctgatatcatcgaaaacaggaatgctctcccgaacttctgcgctttcttgaaggtcgatttccgctcggactatgccttcttcccggccgccttcagcaagtacacgtccccatggatcaataatcaggctatgtcctgcaaattcattatccggatttgaaccggtacaattgcaggctgcgacaaagcattggttttcaatggcccgcgcaataagcaggcttttccaatgatcaaggcggggaagaggccattccgcagaaataaacagcacgttggcgccttttgtcgtatgttttctgatccattccggaaaacggatatcgtaacagatcaatccagagcttttgacgccgtcaagctcaaagtatccgtcttcggaaccggctgataaatacagatgctcatccatcagctgaaaaagatgggcttttctgtactctttaatgatttgcccttccttatccgcaatgtacattgtattataaacatcagaattcttcctgacagcgaccgacccggcgacaatatgaacaccatgtttttttgccgttttcttcagccagctctgagcggagcgcccgtcttcgtcagcgagttcatcaagattggccagatcatatccggtcgtccataattcaggcagaacaagaacatcagcatgtttgctttctttttcgatgaaaaattcagccttttttatattttccgaaggtttgccgtatgaaatatcaaattgaagacaagatatcgtccatttcatctttttaacaccccaaatttttctttacttttttcatttaaccatatatgatgatggactatcatttcaagatttttttagaaggtgagaatagatgaaatttgaacagtctcatgtattgaaggaattgcctaaacaattcttcgcttctctggtgcagaaagtgaaccgaaagctcgcagaaggacatgacgttatcaatctaggacagggaaatccagatcagccgactcctgaacatattgtcgaggagatgaaacgagctgttgctgatcctgagaatcataaatattcgtcttttcgcggctcataccgtctgaagtcagcggctgctgcattttacaaaagagagtacggcattgatctggatccggaaaccgaagtcgctgtattattcggcggaaaagccggtcttgtcgagctcccgcaatgcttgttgaatcccggtgatacgatcttagttcccgatccgggttatccagattactggtcgggtgtcacacttgcaaaagcaaagatggaaatgatgccgctcgtaaaggacagggcgtttctccctgattacagcagcataaccgctgaagtaagggaacaggcgaaattgatgtatttgaattatccgaataatccgaccggagctgttgctacttctgagttctttgaagacaccgtgcgttttgcgactgaaaatggaatctgcgtcgttcacgattttgcttacggcgctgtaggatttgacggctgcaagcctttaagctttttgcagactgaaggtgcgaaggatatcggaattgaaatttacacgctgtcaaaaacgtataatatggcaggatggcgggttggctttgccgtcggaaacgcttcggtcattgaagcgatcaatctttatcaagaccatatgtttgtcagtcttttcagagcgactcaagaggctgcagcagaggcactgttagccgatcagacgtgtgtggcagagcaaaatgccagatatgagagcaggagaaacgcttggatcacggcatgccgggaaatcggctgggatgtaacagctcccgcaggttctttttttgcatggctacctgtgtctgaaggctatacttctgagcagttctcagatcttttgctggaaaaagcgaatgtggcggttgcggctggaaacggcttcggtaaatatggcgagggctacgtcagagtcggacttttaacaagtgaagaaagacttaaggaagccgcttatcgaattggcaaactgaacctgtttacccaaaaaagcattgacaagaccttataacgatgggataattcaaaataatttataaaatctatattttcttatcaagagcaggcagagggacgagcccgatgaagcccggcaaccgacttataaagcacggtgctaattcttgcagctagcggctgagagataagattcggacgagaaacgaaacctctttagacgcgattgcagtttgaagaggttttttgatatggatgaaaatgaaaggagctctggcatgagtgagttattagcgacatatctcctgaccgaaccgggagccgatacagagaagaaagcagaacaaatcgcaacaggattgacagtaggctcctggactgatctgccccttgtaaaacaggagcaaatgcaaaagcataaggggcgggtgataaaagttgaggagagagagggaactcctgcatcagcaaaacaagcggtcatcacaattgcctatcctgaaatcaatttttctcaggatattccggctttgctgacaacagtgtttggcaagctgtccctggacggaaaaatcaaattaatcgatcttcacttctctgaagcatttaagcgtgcactgccgggaccgaagtttggcgtatacggcatccgaaagctgctgggagagtttgagagaccgctgttaatgagcatatttaaaggcgtaatcggaagggacctgagtgatattaaagaacagctccggcagcaggcgcttggcggagttgacttgattaaagacgatgaaattttctttgagactggtctagcgccttttgaaacaagaattgcagaaggaaagcaaatattgaaagaaacgtatgaacaaaccggtcataaaacgctgtatgcggtgaatttgaccggacgtacggctgatctgaaagacaaagcgagacgcgccgccgagttgggagcggatgcgcttttgtttaatgtcttcgcttacggcttggacgttatgcaaggccttgcagaagatcctgaaatcccagttccgattatggcgcatccagcagtgagcggagcgtttacgtcttctccgttttgcggtttttctcacgctcttttactcggaaaattaaaccgatattgcggtgctgacttcagcctctttccgtctccatatggttcggttgcgcttccaagagcagacgcactggcgattcatgaagaatgtgtgagagaggatgcttttaaccaaacatttgcggttccgtcagcaggcattcatcccggcatggttccgctattaatgcgtgatttcggcatagaccacattattaacgccggaggaggcgtacatggacatccgaacggtgcccaaggcggggggcgagcgttcagagccattattgatgcggtcctagaggcccagccgattgatgaaaaagccgaacaatgcaaggatcttaagcttgcgctagataaatggggaaaggttgaagccgtatgacgactcgaaaaccttttattatttgtgattttgacggaaccatcacgatgaacgacaacattataaatatcatgaaaacatttgctcccccagagtgggtggcattaaaagacggcgtactttccaaaacgctgtcgatcaaggaaggtgtcgggcggatgttcggccttctgcccagccgtttaaaagaagagattacaagttttgtattggaagatgcaaaaattagggaaggctttcgggaatttgtagcatttatcaatgagcacgagattccgttttatgtcataagcggtggaatggacttttttgtatatcctttgcttgaaggcattgtggagaaagaccgcatttattgcaaccatgcttcatttgacaatgactatatccatattgactggcctcattcctgcaagggcacatgcagcaatcaatgcgggtgctgtaagccgtcggtcatccatgaactttctgaaccgaaccaatatatcatcatgatcggtgattcggttacagatgtggaggcagcaaagctgtctgacctatgctttgcaagggattatttattaaacgaatgccgggagcaaaacctcaatcatcttccgtatcaagatttttatgagatcagaaaggaaattgagaatgtaaaggaggtacaggaatggctgcaaaacaagaacgctggcgagagctcgctgaagtaaaacgggaattggcagagagagattggtttccggcgactagcggtaatctatcaattaaggttacagatgagcctttaacatttctcgtcactgcaagcggaaaagataaacgtaaagagacggttgaagattttctgctggtcgatcaaaacggagagcctgctgaaagcgggcattctctgaaaccgtcagcagaaacgcttttgcatacacatttgtacaataaaaccaatgccggatgctgcctgcatgtccatacggtaaacaataatgtgatttcagagttatacggagaccaaaagaaaatcacattcaaaggccaggaaattataaaagcactcggcttgtgggaagagaacgcagaagtgaccgttccgattatagaaaatccggcacatatcccgacgcttgcggcactgtttgtggaagagatttcagaagattcaggagctgttctgatccgaaatcatggtattacggcttgggggaaaacagcatttgaggcaaaaagagtgcttgaagcgtatgaatttttgttcagctaccatttgaaattgaaaacactccagcatcagctggttaaataaaaggaggaattgaaatggctacaattcgaattcatgatgaggcaaatacaacgattgaaaatcaagaggaagtggcaagctttctggacagtcaagaggttatttatgagcaatgggatatcacgaagcttccggaacatctctcagagaaatatgacctgacagaagaagaaaaacagcaaattcttgataccttcgaaactgaaattaaagatatctcaacccgccgcggctataaagcacaggatgttatttcattgtcagacagcaatccgaaacttgatgaactgcttgaaaactttaaaagagagcatcaccatacagacgatgaggttcgttttattgtaagcggacacggtatttttgtcattcaaggcaaggacggcacgttttttgatgtccgtttaaaccctggagatttaatctccgtgcctgagaatatccgccattacttcacgcttcaggaggaccgcaaagttgtcgcggtgagaatttttgtcacaactgaaggctgggttcctatttatgaaaaagacagcgtgaatcaataagcatgagatagccccgttcatcgaacggggctttttatatttattgcaaacgccacttttcatactgtgacagttcttttttaatcattgtccaaatcaaacctaaaacagctgcatcgtcaatgaatccaagaccgaggatgacgtctggaatgatatcgagcggcatgacgatatacaggattgcggcagttaacagcaaaagtgttttaacctgtgaacgagggtagtcgccatttcgccaatcgcgaagcatctgaaaaaaagtagtgatgtgctggatacatttttttcggtttttcctcttcaaaattgcttttccgcctgccgctccgagcataattgctttctttttcttcattgggcatacctcctgcctggcggcgtgtttaagatattcttcacctgggtattgttcttctaatcctatcaatatatctattatacctgaaaaattaacttatttaatgaaaatatgtttacaaataaagtataatctgtaataatgcacaataacccaatcaaacttgtttcctatttcttagcggcgaggggtgaagtgaatgggcggttcttctgaacaagaaagattgttggtgtctattgatgaaaaaagaaagttaatgatagatgccgctagaaagcagggatttacagggcatgacacgatcaggcacagtcaggagctggattgtttaataaatgaatatcaccagcttatgcacgaaaacgaacattcccaagggattcaaggccttgtaaagaaattaggcttgtggccccgcagagatgttatgccagcatatgatgcaaataaatagcggcctatcagatgcatatataaagagagagcttttcggaagcgctctttttttctggaaaaaattcatatgaaagggggaactaatgaaggaactggcgattctcattaccgaaatggtcaatcaatttcatgatgcttttatttccttatgcggaatatttggcatttatttaactgacaaagaaatgcatttttgggtgatcggcatttttggcatattctttttcggcgtcactcacgctgtgtttacatggctttctaaatggagtatgacagccttgtcctttatctataccgttacagtcatcattgtcatcgtatttgcgattgagattcagcaaaaggtgacggggagagggaatatggagtttttagatgccacggaaggtataaagggttttttagtattttttatgttttttttgcttttgaaaatgctgttgcgtttcatcaaaatccttttttctggaagaccagcaagcaaatcgaatggcaatacccgatcacgaagataaaaaaccctcctgacatggtcaggggggttatgaagcggatacagggagggtgattgtcacctctgtgcctcttcgcacttcactttcaatatgaatagagcctccgtacatcagcacgatccgtttacaaacaacaaggccgagaccggttcctttttctttagaagtaacaaagggaaggaagatgtgatccagcatttcctgagaaatcccttcaccgttatccacaactttgattatggcttttttatctaaagctcccagggagatcgtcagtttgcctccttcaggcattgactcgaggccattttttgctacatttaaaatcacttgtttaatatgatcttttgtacattttacgagtaagggctgctcggttaaatactgtaattcgacttcaacattgtatagattgccctcagaataaatgatcggcataatttctccgataatgtcctgaagtgagttcagctcccatttttcagctgtcggcttgccgagaacaagaaactcactcactatttgattgatgcgcttgatctcctgttcgataatggagaagtaaagctgatcttcctcacctttatatttcttttgcaacagctgaataaagccgcttatgccggtaagaggattacggatttcatgggctgtgctggcagcaagcgtcccgatcagctctaatttttgcgcctcattttctgagcgctccagctgggtctgccgcttcagcaaataatacagcacgagaataaaaaggatattcagcagaacaataatacatgaaagcggaagcacaaggcttttcgtcagttcttctattgtgaccgggttcggatagactttcatattccagctgatatcatccagatatccgctgacaggtttctgatcctctgcatgagatgcttgtccgctcgcaaaaatcattttcccgtcttggttcacaacttcaatataaacatcagggcttagtaagttaatgagatttttcaaataatcaatttgaatagctgcgacaagataatctgtcacattacgttttgagtccaaaacagggacacaaattgtgaaaattggctgaccagtaattctgctcgaataactatctgaaatgactgtctttttagtttcctttgcttttgtaaaaaaagatctgtcggccaggtttacattcgtttttaattcggttgtgcttgcggtgacgtctcctttggcattgagaaaatagagaccggaaaatctcggctctgaatcaaaggtcttttccaaaattgactgcattttctttatatcaaccggtctgtcaatggcgatggacaaggaggtcattctcgccattgtttctccgattaaataattgattttgttgcggtgaaggtttagcaggacacttgcttcttgtttatgttctgcagctattgtatctttttctttttcatatacgaaaaagctgatgacgattgccggaatcacgaccagtatgatataaagtttgactctcccgcaggcgccttttagtattttcaatttgcatcgctccaacatacacctgattagaggtattatatcattgtttcttcttctttaataagaaaaaataaccaaaaaaattagaaaaaggtgttggcaagcttacattttaaaaaagaagagaaatattggaaagatttttattgacattttggtctttgtttattaatgtttctctgtaacggtttctaaaaggatgattgagacatgacagaaaaatcactgaagttatttatcgtgctgtcgcgcgcgtatcggtctattaacgatcatatgaataagcatattcataagcatgggctgaatccgactgaatttgctgtgctagagcttttgtaccataaaggcgatcagccgctgcagcagataggagataaaattctcttggctagcgggagcatcacatacgttgtagataagctggagcaaaaagaacttctcattcggaaagcgtctcctacagacagacgagtgacatttgcgcaaattactgaaaaaggcatcggtcttttgaacgatattttccctgatcacgctgctgaaattgatgaaatgatcagcgtattaagcgaagaagaggtagagatgtgcaccgaaatgttaaaaagagtaggattaaacgcaaaacagtttcataataagtaaaaaaaggaagcctgatatgtcacaaggcttccttttttgctatttttcatttgtttccgctgcgcctctcggcaaaatgagaacttcaacccgccggtttttgcttcggccttccgcagttttattggaagccaccggtttatactcgccataacccttggcgctgaacacttttgcatcgagcttggggttttcaatcaggagccccataaagtttaccgctctcatgacgcttaaatgccagtttgattggaattcagaatttttaattggcatattatcagtatgtccgctgataatgatatttcttggcgggttaatcacaagaagatttgaaatctcttttgcaagcggcacatcttccttacggatggtcgcttttccagaatcaaagaagatgctgtctttaatcgtaatcagaaggccttcactagtcatcttcgtctccagctgatgttccagctttttatctttgatgaacttttccacctggctcttcacattttcaagttcttcttgatcagctgctttttctttttctttcttgtttttctctttctcttctttttcctttttcacttcatcgatgccgtctgactcgttttcaggaggagtgacactggagtagtccagtacaccggtgccgcctgtaaagacttcattaaatgattttgagagcatttgaaacttagctgcgtcaatcgagctgctcgcgtacagcacaataaacaatgccaggagaagagtaaggatgtcggcgtaaggaacgagccatgattcatcaacgtgctcgtcctcatgcttcttcttcttttttctcgccattttgcgcctctccttgttctgcaaatttcaagcggtccttcgcaggaagatacattaaaagcttttgttcgatgactttcggtgcttgtccttctaaaacggataaaacaccttcaatcatgacctcacgcagttttacttcttgttttgattttcgttttaatttatttgcgaaaggatgccataacacataccctgtaaagataccgagaagtgtggcaacaaaggcggcactgatggcgtgtccaagctcatctgtattgtccatatgagagagagcggcaatcagcccgattacagcgccgagtactccaagtgtcggagcgtacgttcctgcttgtgtaaaaatagcggctccggcttggtgtctgtcctccattgcttcgacttcctctgtcataatatctctgataaattccgcgctttgcccgtcaacagccatgctgagcccgtttttcaagaaagcatcatctacatcctcaatgcttgcttctaaagcaagcagaccttcgcggcgtgcaagctgagcccattcagagaacataggaatgagttcctctattgtgagctgtttattttccttaaataacactcgaaacagcgcaggcacttttttaatttcttttgttgggaacgcaataacgactgctgagattgtcccggcgataataattaaaatggcagcggggtttgcaagggcgctgaaactgacgcctttcagaaccatcccgacgctcaatgccacaaaagcaagaataataccgattaacgaagttttatccatagtttttcaccaaatccttttttactatcttgtctatggttaatatcggttttggtgcccggaactttagggacattgtgaatttgttcatgaaatattcaaggaagaggcatagaagggagaaataaacaaaaacgggctctccaaaattgaaaagcccgggtgtctactgaaattagcagctttcttgcaagctgtccttcagatggtattcatataatagtagaaatacatattcactgtatataaacatgttccatccctccttaaaaaaagtgtaaaggatgaagggaagtagcgcttcaggggaagggacggtattttctaagtcaagagtatgaaagcataaaaaaagcggcttcctaaaaggaaaccgctgattgttatttcgctcgcactttgattttatcatcttctaaaatcacgtgaaaacttgtgatctcgccattatcaagcagcagatcggtcatttcatcctcaacccattcttggatggttcttctaagcggacgtgcaccgaatgaagggtggtagcccagctcagcgattttttctttcgcttcatctgtcacattcaagctaatgccccgttccgccaatgtttcttcaagttctccaagaagaaggctgacgattttgacaagatgttctttttccaatgagcggaactcaataatgctgtcaaaacggttgaggaactcaggtttaaagaacatgctcagtgaatcaattaatgtttgttcttcgatgacactgtcatctgattggaaaccgactttcgtttgtttctcaccagcacccgcattacttgtcatgatgatcacagtgtctttgaagcttacggttctgccttggctgtctgtcagacggccatcttccataatttgcaggaacatatgctgaacgtctgggtgtgctttttcaatctcatccagcaacacaatgctgtaaggattgcggcgcactttctcagttaattgtccagcttcctcatggccgacatatccaggcggtgaaccgataattttagatacggcgtgtttctccatgtattcgctcatatcgagtcggataatagcgtcttttgtgccgaataattcatctgccagtgttttagaaagctctgttttccctacgccggtaggaccgacgaagaggaaggagccgactggtctgtttttggattttaaaccggcgcggcttcgtcttaccgcctttgccactttttgaacagcggcttcttgtccaatcacgcgttcatgaagttttgcttcgagttctttcattttcgtttgttcgtctgcctgcagtttgccgacagggatgcctgttttttgttcaacaatttcctgaatgtgctcagcttccacagtgacagcagtatgagcggaggagctgttcagttttttctccaatgcgagttcttcatcacggagttttgcagccagttcgtaattttcttcttccagggcttttgttttttcggcttcaattgcagttaagcgttcagcggcatcctcatcattcagttcatcaattaacaggttagcttttgaacctgcttcatctaataaatcaattgctttatccggcaggtgtctgtcctgaatgtagcgggatgataaagtgacacacgctttgattgcttcatcactgaatgttacgccatggtacgcctcgtatttgtctttaatcccttgcagaatgaggatagcctgttcaattgaaggctcctgcaccatgacaggctgaaaacgtctttccagcgcggcatctttttcgatttgacgatattctttcagtgttgtcgcgccaatgacttgcagttcgcctctggctagggccggtttgagaatgttgccggcgtccattgatccttctgcagagcctgcgccaacgagaaggtgaatttcatcaatgaacagaatgacattttttcgttccttcagctcagtgatcagctgtttcattctctcctcaaattggcctctgatccctgtgtttgcaacaagggatgcaacatcaagcaaatatagctctttgtttttcagtttgtttggaacatcaccttcagcaatttttaaagcgagcccttcagcgatggcagttttccctacacccggctcaccaataagaaccggattgtttttgttccggcggtttagaatttcgatcactcgcgccacttcatcatcacggccgatgacgggatcaatgagaccggctttagcaccgtttgtaatattttgagccagctcatcaagcagccctttttttccgctttgttttgctgcgctcttttctttcggctggaatgcctgttcaaacggaaatccgaaagattgaggacccatactcattgaaggtttacgggtcagttcgttatagcaagtttcacaaagaaccatctgtttatgaacggaatttatttgcatgttaaggcgaatcgtcgcctcgttttgatgacaatgttgacaacgcatttgccaaaacctccttaataatttgatcttctttgaccaatgaaagtgaataaaaaggtctattggatttgaccttctttgactattagtatacggcaaacttaacggctttcaaaccaatatgctcaaagcagactgaatatttgactatctttgaccaattggtttttaaaaaaggccggtttgtttgaccaactttgattaatagtatactctgaccatctttgactttcaagccttttgcacaacattttttaatttgttacaaagtaaaacatgttttcttcgtcttttcaaggaacttgtctcataggttataaaaaggcatctatggacaaaactgcggttcgttcggaggggagaaatggaacaatcaaaagggtctgcaagtcagcttgcttttgtgtatgtcggcacagtagtcggagctggatttgcgactggcagagaaattgttgagttttttctgaagttcggctggttcggtttattcggcattctcgtcagcggcggaatgtttacgtttctgggcgccaagctgatgatcatttcaaagcgaatcaatgccaagtcatatcaagaaatgaacatctttttgttcggggcggcggctgggcgaattatcaatgtatttatgctgtttgttctcctcggagttacatctgtcatgctttcaggagcaggggcgctttttgaggaacaattggggatgtccgctcagattgggatgcttattacaatcggtctgagcttaattgtgatgactagaggagtaaaaggcattttcggtgtcaatgtgtttgttgttccccttttaatcctcttttcaatgattgtagtggccgactcttttatattcagcgaatcacgaaacgcagctcagtgggtctggccgcatcgctgggattggctgttatcagccttttcttacggggctttgaatttatcgcttgcccaagcagttttggttccgctggcgaatgaaatgtcctcggagaaagtgatcaaaaaaggcgctttaatcggagggacgatgctgacgattgtgctgtccgcgagttttctgtctttgtcaactcttccggatgtatttttgtatgatataccgatggcacaagtggtttatctctttgcacgatctgtccatttgatttatttactcattattttcggagaagtgttcacatcagttatcggtaatctatatggattagaaaaacaagtgcaaagctttcttccagtgaaaagcaaatatatctttgcggccattatgatcacggcttatattacgagccaaatagggtacggcaggcttatttcaacgatttatcccttgtttggctatgtgagcctggccttcataggcgctttgctttgcaaaaaagctcctcggcggcgcagtttataaatatatataatgaaacgaaccgtcactatagagcgataattgatctaggaaccggggactgacttttttattgtcaagaaaaacatcattatggtaagatagcagaagtgaaaaaattgaagaaaatccgtgcgatatgcgggagaggttctagctacaccctctataaaaaactaaggacgagctgtatccttggatacggccttttttatgtttttctagagcaccttccgaaaaaaggtgtttttttgcgtgaattagctgtagcgatgtctctcgccggcgtttttattgcggagaaggagaggaatcatgaaaaaagaaaaagcaattgtcgtatttagcggcggccaagacagcacaacatgcttactgtgggccttaaaagaattcgaagaagtcgaaacggtgacttttcattataatcagcgacattcgcaggaaattgaagtggcaaaatccattgcggaaaagcttggtgtgaaaaatcatttgcttgatatgtcacttttaaatcagcttgcaccgaatgccctgactagaaatgatattgagatagaagtaaaagacggcgaactgccatccacattcgttccaggccgcaatttggtattcttatcctttgcgtctatcctggcttaccaaattggcgcgcgccacattattacaggagtttgcgagacagacttcagcggttatcctgactgccgtgacgaattcgtgaaatcttgcaatgtcacggtaaatctggcaatggagaagccgtttgtgatccacacgcctctcatgtggctcaataaggcggaaacgtggaagcttgcagatgagcttggcgcgctggattttgtgaaaaacaacacgctgacatgctataacggcatcatcgcagacggctgcggcgaatgtccggcatgtcaccttcgttcaaaaggttatgaagaatatatggtgatgaaaggagagcgtgcataaattgttatctcaaatttatccgcaggcccagcatccttattcgtttgaactgaataaggacatgcatatctcagccgctcattttatccctcgggaaagtgcgggagcgtgcagcagggttcacgggcatacgtataccgtaaatataaccgttgccggcgacgaacttgacgattcaggctttcttgtcaatttcagcgtactcaaaaaactggtgcacggaaactatgatcacacgctattaaatgatcatgaagatttttctcaggacgaccggtattcgctgccgacaactgaagtcgtggcgaaaacgatttatgacaacgtacaggcttatttagacactttggagaataagccgacctgtgtacaggtgtttgtccgtgaaacaccgacaagctactgtgtctaccgtccgaaaaagggtggtttgaatggctaaaggaattcctgtattagaaattttcggcccgacgattcaaggagaaggcatggtgatcggacagaaaacgatgttcgtccggacagccggctgcgattattcctgcagctggtgtgactccgctttcacttgggacgggtctgctaaaaaagatattcgctggatgacggcggaggagatttttgcggagcttaaggacattgggggagatgcgttttctcatgtgacgatctcaggcggcaacccggctctgttaaaacagctggatgcttttattgaactgctgaaggaaaataacatccgtgcagcgcttgaaactcaagggaccgtttatcaggattggtttacgctgattgatgacctgacaatttctccaaaaccgccaagctcaaaaatggtaacgaactttcaaaagcttgaccacattttaactttacttcaagagaatgatagacagcatgctgtcagcttgaaggttgtcatctttaatgatgaagatctggaatttgccaaaactgtgcacaagcggtatccgggaatcccgttttatttacaagtcggaaatgatgacgtgcatacgacagatgatcagtcactgattgcacatttgcttggaaaatatgaagcgcttgttgataaggtagctgtcgatgcggagctgaatctcgtcagagtgctcccgcagctgcacaccctgttatggggcaacaaacgcggagtataatagaaaggaagatgaacatgacgacaagaaaagaatcagaattagaaggtgtaacattgctaggcaatcaaggtacaaattatttgttcgaatatgcaccggacgtgctggaatccttcccgaataaacatgtaaaccgtgattactttgtaaaattcaattgcccggaattcacatctttatgtcctaaaacaggccagcctgactttgcgacaatctacatcagctacattcctgatgaaaaaatggttgaaagcaaatcattaaagctgtatctattcagcttcagaaaccatggtgacttccacgaggactgcatgaatatcatcatgaatgacttgattgaattaatggacccgcgctacattgaagtatggggcaaattcacgccaagaggcggaatttccattgacccgtacacaaactacggaaagcctggcacgaagtatgagaaaatggccgaataccgtatgatgaaccatgatttgtatccggagacaattgataatcgttaattattccgttgtgtgatacggagtgtaaaaggaagtggagtcacagtaaaatccgaacattcagcgttaattttcagcgaagtgtgaccggagtgtgacccgcactaagctcaataaaagtgggaaaagtcacacctgaaaatggctctactcatgggaattgtattaaaaagtgtgacctgaggtgcaacctgaactgtgacttttatgcagtgaaaaattgatagtacagaagcagattaaggcgtacaatttgtacgtcttttcttttttatccgaaagaaaatatgcctatctagagatcataggcattaaatattattatcaatatcttcatttattttttggctaagtttctgaaccttctctttaacatttgaaacagctcttttttgaatttcatcaaagttctcctgaatatagtcgatgacacttcttattagaacttcactttcaaaattgaatatctcatttatttctgactgttcttcatctgttaggtgatggtattgaagttgtttagcatttacttcagtagctacatcaatcctaacttagttgttctggttgtacaatttcatattcaccttctgtatacttttgctccgcataatggcttccccattgacagagctcctgcaagataggtttaagagattctccaagttcagtggatgaatattcaaccttcggcggtacttgattatacatctttctgctcacaagtccactggcttcaagctctctaagtgtttgaatcagcattttctgagttatatttgggataatgcgctttaactcactcgttctctttggtccattcattaaaaagtataatacaaggcctttccattttccgccaataacttcctttgtcacttcaaacccacagctaaattttttcatgtctaaagctctccattccacatttattactttttagttactatatcacaaaaaagtgggtacttccgataatgggcttactgaaggatactatatcttgtaagttgttcttcaagtacttaaaggtactagacataaaataaaataattctaaaggagtgttaagtatgggtaaatttgaaggtaaaatagcgcttgtaacgggtggaacaagtgggattggtcttgctacagcacaaaaatttgtaaacgaaggtgcatatgtttatatcacgggacgtagacaaaacgaacttgataaagctgttaaccaaattggcaagaacgtaaccggtgttcaaggtgatatttctaagcttgaagacttagacaaactatatgacattataaagcaggaaaaaggtaagttggacattctttttgctaatgcaggcatcggcaactttcttccattaggtgaaattactgaagagcaggttgatagaacgttcgacattaacgttaaaggaaccatctttactgttcaaaaagcgttatcactattcccggacaaagtaggttctattattgtaacgggctctactgctggatcaattggcaacccagcgtttagtgtatatggagcatctaaagcagcattaagagcactggttcgcaactggattcttgacctaaaaggtactgaaatccgtgtaaatgtggttagtccaggaggtattcttacacctgcctacgatgagctttttggtgatgcacttgaagaagtaatggaaaatagcagaaatactgttccagctggaaaagttgggacacctgaagaagtagcaaacgctgtatctttccttgcttcagacgaaagcagttacttgacgggtgttgaattgttcgtagatggcgggctagcacaggtataatttcactgcgcagagattacaaatagtccccaaaaaaggttaatggggatttacttgaagaagtcgtataaaaaagtcgttttccttaaaggacagggaattcgacttttttatgtttgaatttgattaacgttgtaaattcgcattttcctggggctaccactaaatgacctgtaaaaaagattacactgtgaataaatgtacttaaagtaacgggggctcttgacttttaataaaaaataatatccctgtccttgtattctaatacttttgaaaatatttaaaggaatccttatgtcctgaataaccacataggaaaatatgttgtaggttgctttctttttttgtggggcatcccacacaagctatcttgtgatctcacacctgaacgttttttatagactagtaccgcgacaagttatattacatatacataccaataaagtagacattaaaagtgaaagagaggatggaaatgtgtgaaaattcttttccttgagagtcatcccatgtggctctatggtttaccgaatgggtttagggaagcaggacataccgtaatgatttccggtcctgtaagtcgggaaaatatcactgaaatgatagacgaatttaaaccagatctaatagtatctatgggatggacaccagagcattcaagggaaaagcaggcctggattcgcaacgctactaaaaaggtgaatatccctctcgtttattgggctactgaagacccgctgcacactcaaaactttactatcccgttaattaaaaagatgaaaccagattttgttttcacggttacgccttctctgtgtaaaacttatgaaagcatggggattaaagcagctcacttagattttgcatttcacgaaagtatacatcaccagattaaaccattagcaaaatacagttgtgatatagcagtggtggctaatgcttaccctaattttcttgaagaacatccggaagtgttccgttcgtcctctttaaaaacgcttattcgtcctcttatacggaagggtattcgcattgatttttgggggagaaactgggaaaaaatgagtaaatatataggaagagaaattccccccaattggatccatggataccttgattatactgaagcatataaagtttacagttcagcaaaagtcgttatcggtttgcaaaactgtgaaagccaacttacgcaacgcacctatgagattcttggttccggggggtttttattgacatcggatacaccagcagttcgaggtaaattcaaatctggccgcgatctcatcgtttcttcctccccaaaagaaacattggaaaaggttaaatactatttgaatcatgatagcgagagaaaaaagattcagataaacggtaaaaaggctgtaaagaatgattcctatcggcatagagccgagagaatgcttgaggtgctaaaaagcagaggaattataagaaacttaggggaaaccattcattatgtagatgttctcaaagaaaaatacctgatccatcatgttactcccggtgaaacattatcaataattgccaggaagtataatgtttccctgcagcaactcatggagcttaatcatttcaaatcagatcaaatatatgctggacaaatcattaagattagagagaaactgtttagaaatattaataacaaatttttctaaaggagagtaatatgaatgaaggagagaataccaaaaaaggaaatagagcgaataaagtaaaaagaacgcctcgttatatggaatttcccgtgacatacgaagtatataatgtggaatccggcgatacattatggacgattgccaaatcctttaaaattccggtacaacaacttatgaatcttaataagctttcttcagatagaatttatcctggacaaattataaagataagagaaagataatctttgaggtttcggaaacgaatcaaattgaaatgacaatccttatttttttatttgtggggaacttgatatttttggggatgaaggggttatgagatgtttcaaatgagctatttctattctggattaggatgggattttattcaacacgttgatcaaacgaacggagtattaaatgttgtgtctcctgattttttctatatcagaaaagatggatcattacttctccgttcagctaatcccgatgtgattaaagctcttcatagaagaaaattaaaagtagttccttttctaagcaatcattgggatcaggatttgggacgatttgcattaatgaaccgagttcgtttagctaaacaaatttctcatgcaatagaagaactggatttggacggaattaatatcgatatagaaaaccttacagaaaaagatcggaatctatttacagattttattagattagtaaggaaaagtattcctaaacataaagaagtatcagttgcagtggcggcaaatccttttggctggacgaagggctggcacggatcatatgattacgagtatttagctaaatatgcagattatcttatggttatggcctatgatgaaagccgccttgctgggcctaccgcaagtgtaggatgggtggaaaagtccattcaatatgttctgacccaaaaaatctctcctcaaaaactagttttaggattgccattctatggccgctgctggatggaaggccaatctgcctctcaagccattcccctttaccttgttgactccttagtaaaaaggcatagcgggacaattatttttgacaccaagagtcaatctccaaaagctatttttactgtcaatcacgataacaaggggccgttgccttcgggaacatatacattatggtttgaaaatgaacagtcactcagagcaaaaataaaactcgctcaaaaatataatctgaaaggtcttggcagctggagtcttggacaagaagatgtgtcagtctggaatacagtgtttaaaaatatataatgatttatagttcagaacaaaattcgaagataattgcaatgaatctctaaatggacatactgaaaggagtttattacgagtgcgggtaaaacagtgagggcattccataggcccttctcccgaaatgttctatacgaggcattacattgggcttgaaatacacattcaaacttatgttatagtacgcatttcaagtaattacggatgtgttgaatttattctgcttccatgatttaagtcatacacatgctacttgatagcaggattattgcatttcattcagaattgttcaggatcgatatggaagcgcacgaataactagaactttaaaagcatacactcatatacttcctgaatggatgctggtttatctaaaaaacatgatgagaattgattgaccgctctcattaaaggatggagaaattcaaggcgccaaggtacgcatggtgaaacatgacttgttgataatcgaccatatagtttctccttagaaatgagggggtttttacataaaaaagacgagcgaatccggggggaattccactcgccgctttctaatgaaaagacgggatgctggatggcagctcgtctgttttattataatttaacgaacgtatgtttgtaaaggtgtcttttcgaatgaattggttcatataaccgttaagaacagattcattgtaaacattcgctaaggtatgctaagatgcatggactataaaggagtgatatgaagtgaagacattgcggttaaacaatgtaacgttagaaatggctgcatatcaagaggagagcgagccgaagcgaaaaattgcatttaccttaaacgttacgagtgagacttaccatgatatcgctgtcctgttgtatgaaaaaacgtttaatgtcgaggttccggaacgcgatcttgccttccggggggaaatgacaaattattcaacatcattgaccaacctgtacgaaccaggggccgtcagcgagttctatatagaaataacagaaatagacaaaaacgccgattcatgatcggtgttttttatgtaaaaaagctgccggccggcagcttttgagaaagcgaatttcatatgtaaggtgttaaattgtccgtcttgcagttttttgaataaatgtggaaataaggaggttttaataggagtctctgatgatcttataatttttatgattaacaactgtcaatgaatctaactcaagatcccgatagttatccatgatcgtcacatcaacgataacagaattctcatttactttttcaacaacaccggttaatccgtttttaaattcaatgacattcccaaccttagcgattttcacaagcttcctctcctttaaacataataatgccttttgaaagtattttgcagtattttcattgagaagtaaagcgataaggagttttatctcccttatgaattgtcctgtcgctataaagatgatatattgattttcgtcaatagaaagaaaaggggggaatttttgttgcgtcccgaagaaataacagaaatgattgaacagctgcgcaccggcgccataaacgaactgagagtccagaaagagcattttcttgatttcagggccgtgttatctaaacaagatgattttaaacatttccgaggaattgcccagcaaggcggagatgttatctttcaatacttagaacagccaagaagctgaaggtttctcatacgtgagaagcctttttatcatatatgacagaacacaagccttttattacagctgtctgtaacaggtgtaataaaatgtaaagtgtcaaaaatggataaacatgttttaatttgacaatatttatagaatttcaaactgtttttttgccattaagcagtgagtcatcctctttattccatcctgatacctccttgggagagttggaaaatctttttccgtgaaaatgaatggatctcttgttaaggttatgaagtgttttttggagcactttaaggaggaaactgtatgacaacgaaattcactgctctggctgtttttcttctttgtttcatgcctgcagccaaaattgagcatacacaagcttcactactgagcgcaaagaagacaaaacatgaagaagcgaaatggcttacacatatagatcgaaatacgaatgaatctttcccttcactgtctgctgataaagacaagaaaataaaaccgattaagctatcagcacacactgaaaagaaagagaaagataaaccggacaaaacaaatgatgagaaagaaacatatacacagtctgaaaaagagttgctgtcacgtctcgttcacgcagaggccaaaggagaatcatataaaggcaaggtcgctgtagcaagcgttgtactgaacagaacggagaaaaaaggttttcctgatacgataagaggagttatttatcagaaaaacgcctttgaaccggtcgcaaacgggagcattaaccaaaagcctgataaagaatcgattgaagctgccgaagaagcgctgtcctcaaaaaatagagaaacagatgccatattcttttataatccgaaaacagcgtcagataattggattcgttcaagaaaaatcgtagaaaaaatcggcagacacgtttttgccgtctaagcatagaagagacaatttgtctcagctgtgcttttttcatataaagagtaaaaataaaataatttttgaacttgtctcatatgatgttggtagtacaagagacaaggagagacatcatgaatcgatttgtgaaagggatcattcttttatccattgccgcctttttcgctgaatgccttgaatttgtcgtcaatatgattttggcgcgggagcttggcgagcatgggatggggctttacatgagtattttgcccacgatctttttaattattgtcatcgcgagcctggaactgccgatatccatttctaaattcattgccgagtcaaatcctaagcttcatgaaagcatgctgaggcacgctttcagaatgacagccatttttactgctttttctactgtcgccgctagtattgcgcttccgtttataccggtatttgatacataccacccgtttattaaagggattgtcatcggcttaattcctgttgtcgcctttacttcaatcgccaggggctactttatgggtgtgcagaaaatggggaagatcgcaattgccaatgtgctgaaaaaaatcatccagctcttgtgcttattcctcttttttcaatggtactcatttgaattggacatggctgtgctgatttccttgtttgttctagtcgtgagtgatgtggtcgtgcttgtttatttatattcacaatttatcatggcaaggcgggcgttatccggccagcagcacattcatttgcgcggaaaggatgtaaggaaaagactgcttgctgtttcaattcctacaacaggactgcgtatttttcatgcggttgtcaatgcaattgaaccctttttagtaaaaggagctcttttggctgcgggcgttgccgggacagcggcgatcgatcaatacggaatgctggcaggagtggctgtgacgatagggtcgttccctgcttttattgcccattcgttaatggtcgtcatgataccgagtatttcggaagcttatgcactttctcagtatgacatcgtgttaaaaaggctgaagcagtcgattttcattacattaggttacggtatacctgccgtctgggtcatgttccagtttgcgggacctctcacgcatttgttttttcactctcctgaagcgcagtattatttgcagctgttgtggccttactttctctttcatctgtttgtcatgccgctgcaggcgtgcttaatcgggatgggttttgtgaaagaggctttttatcacaatgtatggagtcatatcgttgcgctaagtatgatgtatgtactgggatcaatggagaatctgcaaatgctcgggattatccttggaatgaacactggcatgattcttttgacgagcctgcactatgccacgatctgcaaagcattgaaggtatccgtattccttacgggagggaccagaacgccgcgaattgaaggatgatataggaactgcaggggcaagctaattgaaaagcatgaaaggaagattccatgttgacgaagcgcttgcttactatatacattatgttattagggttgattgcatggtttccatgtgcggcacaagctgaggaaaaacagcctgctgttcccgctgtttttcttatgaaaacgatagaaggggaggacatctcgattccgaataaagggcaaaaaacaattctccatttttggacgtcatggtgtccgccctgcaaaaaggagcttccccagtttcaatcgttttatgatgcccatccatccgacagtgtaaagctggtaacggtgaatttagtgaattcggaacaaaatcaacaagtcgttgaagattttattaaagcaaacaagctgacgttcccgattgttcttgactcaaaaggggaattgatgaaggagtatcatatcattacgatcccaacatcatttttgctgaatgaaaagggagaaattgaaaaaacaaaaattggcccgatgacagcggaacaactgaaggaatggacggaagaatagctgagagcatagactctcagcttttttcatatagagaagaagcgaataaacattaatgataattattatcaaaaagaaattaaaataattataattgaaattctcttcgtgcgtgctataataaaggaagacatcaagaaataactgacgataaagctgccttttgggcagcgattttgtttttataagagaaatgaagatgatttacgttctcaattagagaggagaattcgatatgaatgaacaagttatcgttcaacgcgacccgcatgagccattgaaaacagacaagagggaaaaaaactgggcacagcacgcggagcttattgcagcacttgtatcaggcgctcttattttggcaggctggctcttatccggatatcaggtattatccataatacttttcttgctggcttttgtgatcggcggatttgctaaagcgaaggaaggaatcgaagaaacactcgaagccaaaacgctgaatgtagaacttttaatgattttcgctgccgttggttccgccttgatcggatactgggcagagggtgctattttaatatttattttttccttaagcggagctttagaaacatacacgatgaataaaagcagcagagatttaacgtctttaatgcagcttgagcctgaagaagcgacattgatggtcaatggtgaaaccaaaagagttccggtttcagacttgcaggccggtgatatgattgtgatcaaacctggagaacgcgtagcggcagacggtatcattgaatcgggctcgacaagtcttgacgagtcggctttaacaggtgaatcaatgcctgtagaaaaaaacacaggcgacactgtattcacaggaacggtgaatcgcaatggctccttgactgtccgtgtcacgaaagcaaatgaagattcgttattcagaaaaattatcaaactggttgaatcagcgcaaaatagtgtttcacccgctcaggcttttatcgaacgatttgaaaatgcttatgtgaaaggtgtgctaattgcggtggcgctccttttattcgtcccgcactttgcgctgggctggagctggagtgaaaccttctaccgcgcaatggtgtttatggttgtcgcgtcaccttgtgcgcttgtcgcctctattatgccagcggcgctgtccctgatttcaaatggcgcccgcaacggtatgcttgtgaaaggaagcgtctttcttgaacagctgggctcagtgcaaatgatcgcctttgataaaaccggcactgtaacaaaaggccagcctgccgtagagacgatcagaatagcagaaggattcagtgaagcggaagttcttgaggctgtctatgccatcgaaacgcaatcaagccatccgctcgcccaagccataacggcgtacgctgacagccgtggcgtgaatcagtccggctacatatctatagaagaaacctcagggtttggcgttatggcagaagtgtcgggtgcgatatggaaggtcggtaaagcaggttttatcggcgaggaaatggcagcacaatttttgaaacaaacagcatccgatgtcattcaaagcggtcatacaattgtatttgtgaaaaaggatgatcaaatagtatgctgtatcgcactgaaggaccaaatcaggcctgaagcaaaagaggtcatggaagaactgaaccgacttgggattaaaacggccatgctgacaggagatcacgaagacacggctcaagcgattgccaaggaagccggcatgacaactgtcgtagcagaatgcctgcctgaccaaaaagtgaatgaaatcaaacggttaaaagaagaattcggaacgattgcaatggtgggtgacggaatcaatgatgcgccggcactcaaagcggcggatgtcggcattgcgatgggcggcggaacagatgtagcacttgagaccgctgatatggtcctcatgaaaaacgatttgaaaaagctcgtaaacatgtgccgcttgtctcggaaaatgaacaggatcatcaaacaaaatatcgtgttttctctagctgtaatctgcctgctgatttgtgcaaactttttgcaggcgatggaattgccatttggcgtgattggtcatgagggcagcacgattttagtcatactaaacggtttaagactcctaaaataaagccagcagcctaatcaggctgctggctttttatgtatcaagctttcccttcatttttgtctttatcagatcttttcataaccaggatgagagcgaggatgcagcaaaggaaacccgctgcacagcctatgatagagctgtaataataaaagcccaccatcttcatcccgataaaaggagcggaaattcccaaaaccgttaagagcataactgcttttcgtctgaaaaaattcatcagcaaacggaacaaccccctgcgattgaacgttactgtcagtatacaggaagaggagcaggaaataaaatgcattagaaaatgaaggcgtcgtgaaaggcaaacaccggtaaaacctgttacaatggaagacagaacaatgcattgcaaatggcagggaggaacaagaagtgaatagaatacaacgcgtctcttcatggctgaaggaagcggggcatactgccgcatttattcatacaaaagaaaatgttttttacttaaccggtttttacacagagccgcatgaaagattaatggggttatttatttttcaagaagaggagcctttctttgtttgtccaggaatggaagcaggacaggcccgcaacgcaggctggaatcatgaaatcattggctatgcggatcacgaaaatccatgggagctgatagagaaggccttgaaaaagcgaaatatcagcatacatacgcttgcggtagaaaaggattcaatctcgctatcacgtgcagaacagctgaagcatgcgacgggcggggctcaatttgtttcagcagaagaaacactcaatcaatttcgcctgattaaagaagacaatgagattcgtttgctgaaagaggcggcaaagcttgcggattacggtgttgaagtcggcacagccgctttgcgtgaaggcatcagtgaagtggaagtgctcgctcaaattgagtatgagctgaagaaaaaaggaattcagggcatgtctttctctacaatggttttattcggagaaaaatcaggccagcctcatggaaatcctggtacagccacgttgaagaaaggtgattttgttttatttgatctcggtgttattcttgacggctattgctctgatattacaagaacgtttgcatacaaaaccatcaatccgaagcaggaggccatttacgagactgtgcttcaagcggaaaaagccgcgattgaggcaagcaaacccggtgtgagaatcggagatctggatttaacagcccgtggaatcattgaaaaagcgggatacggtgactattttcctcaccggcttgggcatggactcggaatttctgtccatgagtatccatccatgagccaggccaacgatacactgttgcaggaaggcatggtctacacgatcgaaccggggatttatgtgcctgagatcggcggcgtgcgcattgaggatgacgttcacgtaacaaaggacggagcagttgctctgacccaatatccaaaggaattaatcatactgccgtaatagaaataaaaaaggactttgttctcgacatcgtccttttttatctgcattaaataaaaaaatcatcaaatgttcgaaagggtttaatttcatgtttttggttgagaggttttacagcaagacagctgccaccgagaacagtgagacataacccaattaaaatgaagaaacccatgtgatcttctcctttcagcttaaaacacaaaaagatatctggtacgtccatatcatattgtatgaaacgcattccagatcaaggggatttagaaagaagggaatctatggctaatattaaagacattgcagaaaaagccggtgtctctgttacaacggtttcccgagtcataaacaatcatccatacgtcagtgaagacaaacgaaaaagagtgtttgaggcaatggaatcattggagtacacgagaaatattcacgctgtacatttgtcgaaaggattttcaaacatgattggtgttgtcttgccaacggttaatctgccatattttgcagagctgattgcaggaatagccgacgcagccgcggaatccggggttcacctctctttattccaaacaaactatgaggtacaaaaagaaatctttgcgctgtcccaattaaagcagcgccaggttgacggcctgattttttgctcaaaggcgcttgctgatgagaaactcatggaatgggagggcccgattttgctttgccagaattcagataatgcccgcttcccaaccatcagcattcctcaccaagaagcatttcggaacggcttggactatttaattgccaaagggcacaaaaaaatagccatctgtttggcaagaaaaaaaggcatgaacagccattttcgaatcaaagcctacaaagaggcattggaagagatcggcgaggcatttcgtgaagactgggtaattgagaaagcgattacaattaatgatgggaaggcgctttttcataaatggaaaacgtggaaggaaaagccgacggctatttttgttgccaatgaccaagtctcagcagggctttttcttgaagcaaagaaccagcgggtgtcagtaccggatgagcttgcaatcttaagcgttgataaccacgaaatcagccaagcgcttggaatcacaacgatcgatattcagacaagggaaatgggaaagcaggcatttgccatactggaaaaaagaattcaaggacagccaattgaaaggaaagttctggattaccgtctcatcgaaagatcgactgtttagtgaatgcattgaaaaaaggtttgacgtgcattccgttcgttatgtacgatatgaggtattgaatgacaaaggagctgaggatcgtgaatgggtccttcacagtgaaaaaggtactgaataataacgtattaattgcttctcatcataaatacagcgaagtcgttttaatcggaaaaggtattggtttcggaaaaaaacaagatgatgtcattgaagataaaggctacgataaaatgttcattttaaaagacgagaaggaacaaaagcaatttaaaaagctccttgactatgttgatgaaaagctcgttgatatttcaaacgatgtcatctatcacataagaaataggactaatcactcattaaatgaacatattcacattgcgttgacagaccatatcgcatttgcgatcaaaaggcagcagcagggatttgatatgaaaaatccatttctaatggagactcagtcactatatcctgaggagtaccaaattgccaaagaagtcatagatatgatcaatgaaaaagcgggaatctgccttccggaaggggagattggttttatcgctctgcatatccattcagcattgacaaaccgtccgctgtccgaggtcaatcagcactctcagctcatggcgcagcttgtcgaggtgattgaagactcatttcaaatgaaagtaaataaggaaagtgtcaactatttgcggctgatcaggcatatcagatttacaatagaaagaattaaaaaagaagaaccgactaaagaaccagaaaaattaatgttgttattgaaaaatgaatatccgctatgctacaatacagcttggaaattgattaaaatcttgcagcaaacattgaagaaaccagttcatgaggcggaagcggtttatctgacgcttcatctgtaccgattaaccaataaaatttcataaattcagtttatccttataacgtgttactgattcgatcaggcatgagtgattgagggaaaaaaacgggaagttcattctcgttcttttgcgcacccaattttgctcatgcctttttgttgtgtaaaagggcaaatgtaaacggttaaactggaagacttacgcctgtgaattcgttgtcatgatttttagctgtaaggtcagactagtaaaaagaggaggtcaattcttatgtttaaagcattattcggcgttcttcaaaaaattgggcgtgcgcttatgcttccagttgcgatccttccggctgcgggtattttgcttgcgatcgggaatgcgatgcaaaataaggacatgattcaggtcctgcatttcttgagcaatgacaatgttcagcttgtagcaggtgtgatggaaagcgctgggcagattgttttcgataaccttccgcttcttttcgcagtaggtgtagccatcgggcttgccaatggtgatggagttgcagggattgcagcaattatcggttatcttgtaatgaatgtatccatgagtgcggttcttcttgcaaacggaaccattccttcggattcagttgaaagagccaagttctttacggaaaaccatcctgcatatgtaaacatgcttggtatacctaccttggcgacaggggtgttcggcggtattatcgtcggtgtgttagctgcattattgtttaacagattttacacaattgaactgccgcaataccttggtttctttgcgggtaaacgtttcgttccaattgttacgtcaatttctgcactgattctgggtcttattatgttagtgatctggcctccgatccagcatggattgaatgccttttcaacaggattagtggaagcgaatccaacccttgctgcatttatcttcggggtgattgaacgttcgcttatcccattcggattgcaccacattttctattcgccgttctggtatgaattcttcagctataagagtgcagcaggagaaatcatccgcggggatcagcgtatctttatggcgcagattaaagacggcgtacagttaacggcaggtacgtttatgacaggtaaatatccatttatgatgttcggtctgcctgctgcggcgcttgccatttatcatgaagcaaaaccgcaaaacaaaaaactcgttgcaggtattatgggttcagcggccttgacatccttcttaacggggatcacagagccattggaattttctttcttattcgttgctccagtcctgtttgcgattcactgtttgtttgcgggactttcattcatggtcatgcagctgttgaatgttaagattggtatgacattctccggtggtttaattgactacttcctattcggtattttaccgaaccggacggcatggtggcttgtcatccctgtcggcttagggttagcggtcatttactacttcggattccgatttgccatccgcaaatttaatctgaaaacacctggacgcgaggatgctgcggaagaaacagcagcacctgggaaaacaggtgaagcaggggatcttccttatgagattctgcaggcaatgggtgaccaggaaaacatcaaacaccttgatgcttgtatcactcgtctgcgtgtgactgtaaacgatcagaaaaaggttgataaagaccgtctgaaacagcttggcgcttccggagtgctggaagtcggcaacaacattcaggctattttcggaccgcgttctgacgggttaaaaacacaaatgcaagacattattgcgggacgcaagcctagacctgaaccgaaaacatctgctcaagaggaagtaggccagcaggttgaggaagtgattgcagaaccgctgcaaaatgaaatcggcgaggaagttttcgtttctccgattaccggggaaattcacccgattacggatgttcctgaccaagtcttctcagggaaaatgatgggtgacggttttgcgattctcccttctgaaggaattgtcgtatcaccggttcgcggaaaaattctaaatgtgttcccgacgaaacatgcgatcggcctgcaatccgacggcggaagagaaattttaatccactttggtattgataccgtcagcctgaagggcgaaggatttacgtctttcgtatcagaaggagaccgtgttgagcctggacaaaaacttcttgaagttgatctggatgcagtcaaaccgaatgtaccatctctcatgacaccgattgtatttacaaaccttgctgaaggagaaacagtcagcattaaagcaagcggttcagtcaacagagaacaagaagatattgtgaagattgaaaaataagggtgttagtacgccgtgcttgtcagatgacaagtacggttgtatgatataatattgtgaagtaataaagctttaagttaaaaggagaatgataaaaatggcacaaaaaacatttaaagtaactgcagattctggaatccatgctcgtcctgcgacagttcttgtacaaactgctagcaaatacgacgctgacgttaatttagaatataacggcaaaacagttaaccttaaatctattatgggtgttatgtctttaggtatcgctaaaggcgctgagatcacaatctctgcttccggagctgacgaaaacgatgctcttaacgctttagaagaaacaatgaaaagcgaaggactcggcgagtaatgcaagaattaaaagggattggtgcttcagccggcatcgcgattgcaaaagcataccggcttgaagagccagatttaacggttgaaaagaaaaacatctctgattctgaagcggaagtaagccgttttgatgaagcgattgcacgttcaaaaaaagagctcgaaaaaatcaaagagcacgctttgaaagaactgggtcaggataaagctgatattttttctgctcaccttttagttctcagtgaccctgagcttctgaaccctgtgaaagaaaaaatcagcactgattcagtgaacgctgaattcgctttaaaagaaacgtcttctatgttcgttaccatgtttgaatctatggacaacgaatatatgaaagagcgtgcggcagatatccgcgatgtaacaaaacgcgtaaccggccacctgcttggcgtcgaaattccaaacccaagcatgatctcagaagaggttattattgtagctgaagacttaacaccgtctgacacagctcaattaaaccgtgagttcgtaaaaggattcactactgatatcggcggacgcacatctcactctgccatcatggcacgttctcttgagattccagcagttgttggaacgaaagcggcgacaggcacgatccaaaacggcgtgactgttatcgttgacggtatcaatggcgatgtcattattgacccatctgcggaaactgtaaaagagtatgaagaaaaacataatgcttatttggctcaaaaagctgagtgggcgaagcttgtcaatgaaccgactgtctcaaaagacggacatcatgtagagcttgcagcgaacatcggtactcctgatgatgtaaaaggtgttcttgaaaacggcggagaagcagttggcctttaccgtacagaattcctttacatgggaagagatcagctgcctacagaagatgagcagtttgatgcttacaaaacggttcttgagcgtatggaaggaaaatcagtcgtcgtgcggacacttgatatcggcggagacaaagagcttccttacctgcagcttcctaaagaaatgaacccgttcctgggatatagagcgattcgtctttgccttgaagagcaagaaatcttcagaacacagcttcgcgcgctgcttcgtgcaagtacatacggaaacttgaaaatcatgttccctatgattgcgacagttaacgaattcaaagaagcaaaagcgatccttcttgaagagaaagaaaagctcgtaaaagcgggacaggctgtatctgacgatattgaagtcggaatgatggttgagattccgtcaactgcagtcatcgctgatcagtttgctaaagaggttgatttcttcagtatcggaacaaacgatttgatccaatacacaatggcagctgaccgtatgaatgaacgtgtatcttacctgtatcagccatacaacccggcaatccttcgcttaattacactcgtaattgaagcagcacacaaagaaggaaaatgggttggcatgtgcggagaaatggcaggagacgagattgcgattccgatccttctcggcttaggcttagatgagttctcaatgagcgcaacgtctatccttccggcaagaacacaaatcagcaaattgtctaaacaagaagctgagtcattcaaagagaaaatcttatctatgagcacgacagaagaagttgtcgcgttcgtaaaagaaaccttcaagtaatgtacaaaaaccagacggcctccggcctgtctggtttttttcataagtaagggcatagaaggacacaataacatggctaggagggatagtatgtcaaaccaatttaacgcaggagatactgtttatgtgatctacagaaatccgcacgctgccaatgtagctcacataaaggaagccgaaattgtgcaccatccataccatgaaggcgagctttccctgtttatttatgaaacctatcatccgttcgcagaggacgatgctgtgtttgcaagctatgaagaagctaaatcgctttacaaagaactgtttgatattgatccgtatgagtaacaaggaaatcattacaactcatatcctttccgcctagtgagaaaagtaacgttagtaaaggaaaaggatgtggcatcatgcagaacccatttgttccgcagcttgtgtatatagaaccgagggcgctggaatatccgctgggccaagaattacaagataaatttgagaatatgggtattgaaatcagagaaacgacatcccacaatcaggtgcgtaatatccctgggaaaaatcatcttcagcaatatcgcaatgcgaaatcaactttagttatcggtgtccggaaaacattaaagtttgattcatccaaaccctcggccgaatatgccattccgtttgcaacaggctgcatggggcattgtcattactgctacctgcaaacaaccatgggatcaaagccgtatatcagaacttatgtaaacgtcgaagagattttagatcaggcagataagtatatgaaggagcgcgcaccagagttcacaaggttcgaagcatcatgtacgtcagacattgtaggaattgatcatctgacacacacgctgaagcgcgccattgaacattttggccaaagtgatctcggaaagctccgatttgtaacgaaatttcatcatgtcgatcacctattagacgcaaagcataacgggaaaacgagattcagattcagtattaatgccgactatgtgattaaaaactttgagccgggaacttcacctcttgataagcggatagaagcggcagtaaaagttgcaaaagcaggctacccgctaggctttattgttgctccgatttatattcatgaaggctgggaagaaggatacagacatctgtttgaaaagctagatgctgctttgccgcaggacgttagacatgacattacgtttgaattaattcaacaccgttttacaaaaccggccaaacgagtgatagagaaaaattatccgaagacgaagctcgaattagatgaagaaaagcgccgttataaatggggccgttacgggatcggaaaatatatttatcagaaagatgaagagcatgcacttcgagaggcacttgaatcctatattgatacctttttccctaacgcaaaaattgaatatttcacttaaacgggctgttgtgatcaacagctcgcttttttataaaaaggatttttccattccatcaaaacgccgtaattcaatgattctttatcctccaaataattgctgactacacgaataggtgaacgcccgcaacggaggagaaaggacagcacagggtcgtttttcctgccttccatcacatcttcaacgtactgaacagcgctgatctcgtgtgcgtatttataatacaaaggaatgcggccgccgccgagaaggcgttccagtcttttatcaacagtcagctcatacatcgtattcatcagccattttccgattccaagctttcgataatgaggagaaacagaaatatccactacatataaagtatttccatgaggttcatgatttttaatcgatccgttgtcagttgcttgtgcccatgtatgatcaggagattcaggctcaaattgtacaataagagcagtcatggaaccgataattctgtcattgatgagcgcgcataaagcgccttccggaaaggttttgatatggctggcaagctggtcctctgaccacagcaattcctggggaaacggaggagggaaacattcttcttgaagagaaatcagcctctcgatgtcagtctcagtgtagtttctaatggtcagagcctcaaattttctgccgtcatgcacatacatttgttttagtatgatcatcactctccttatgttgtttcattataacgaagattgaattttcagtaaatatattccgattttcttataatttattttttgattattcatttttcaaacgaaagggccgatatagaaattaggaggggattggtttgtttaaaaaacttcacatgaagattgctgtttttgtttcgattatgttaatcatcacagttgttcttttaatgctgtcttcttatttgacgctaaaaccgatgattacagaggatgggaaaaatacaactcaaaacgtgacgcagtcacttgaacaaaatattgaattgcaattaaagagttatgccatttcgttatcaagattggctaatggggaattaacgcatacatttgtaacgaaaccaagtaaagaagcttctcggctgtttcacgatgacattaagcaaatcaaagataacgatgattatgttgcgatggcttacataggcaccgcaaaaaaagaaatgtttacatatccaaaagcggatttcgctgaggattacgatccaacatcaagaccatggtataagcttgcagctgaaaccccggatcaagttgtttggacggaaccttataaagatgtcgtgacaggagacatgattgttactgcatcgaaagcgatcttagacgggcaaaaagtgataggggttgccagctatgacttgaaactctctgctatccagagtatggtcaataaacaaaaggtgccttacaatggatttgcctttttagctgatgcgagcggcaatcttttagcccatccgtcaaatcaaggaaaaaatatatcaaaggatcaaacactgcaaaccatcgcatccgagaaaaaagggatacaagatgtgaatgggaaaatggttgtgtaccaaacgattggcgaaacgggctggaaggtcggaacgcagtttgataccgatcaattaatgtggatttcagataaaatgaatcgggcaaatctttggatatcattgattgcgcttatcataacaattattctcagctacttcctggccaaaacgataaccggcccgatacagcagctgatcgcaaaaacgaaagctgtttccgcaggcgatttaacagtgcgcgcggaatcaaaatccaaggatgaagtcggtattttaacaagagactttaatctgatggttgaaaatatgaaggaaatggttgagcaagtcagactctcttcagggaaagtatctgacacctctgaacaattaacggctgtctctgccgaaacaaatgaaacaagcggacaaattgcaaaagcgattgaagaagtagccgcaggggcatcggaacaggcttctgaagttgaaaccattaatgaaaaatcggaaagcctgtcaacgaaaatcaggcaaatcgctgaggaggcaggcggaattaaagaacgatcaaaatcgtccgaggatgcaagctataaaggacttgacgcgctcggccagctgctgatgaaatcaaacgaagccaatatggaaacgaaaaaggttgaaacgatgctgctggatttggaaaatcaaactaagaatattgaagaagtcgttacagcgatttcaaacatatctgatcaaaccaacttgcttgccttaaatgccagtattgaggcagccagagccggagaaagcgggcgcggttttgccgtcgtagccgatgaagtgcggaagttagctgagcaatcagccctttctacaaagcatatcagcgagactgtgaagcttatccagcttgagacaaaagaggcctctcacgcgatggttgaggcaagcagaatgaatgatgaacaaaacagtgccattcacgaaactggagaggtattaaatacgataactgcagaaatgcagtcactggtacaaggtattgatcacatttacgcggaaattcaaagaatgagtgaagaacagcttgcgatatctgaagctattcaaagcatttcagccatatcacaggaatcagctgccgcagcagaggaagtgaacgcatcaaccgatgaacagcttgtcacccttgagaaagtcaaacactcaacggaaacactaaaacatgcaagccaagagcttatgaacacaattgcaaaattcacattgtaatccaattacatccccaaacatcatttgttttggggattttttattttataagatgaatagatatggtagtctagaaaatgaaggaaaaatgataaattttaactaaaatctaaacgaaacatctgggaggaatgaccttgaaaaaaacaattggttttatcggtcttggagtaatgggaaaaagcatggcatcacatattctcaatgacggccaccctgttttggtgtacacccggacaaaagaaaaagcagaaagcatacttcaaaaaggcgcgatctggaaagatacggtcaaagatctttcgaaagaagcggatgttatcatcacaatggtcggctatcccagtgatgttgaagaagtgtatttcggaagcaatggaattattgaaaacgcaaaagaaggcgcatatcttattgatatgacgacatctaagccttcgcttgcgaagaagattgctgaagcggccaaagaaaaagcattgttcgctttagacgctcctgtttccggtggagacgtcggtgcacaaaacggaacactcgcaattatggtcggtggagaaaaagaagcttttgaagcctgcatgccgattttctctttaatgggagagaatattcagtatcaaggaccggctggaagcggacagcataccaagatgtgcaatcagattgcaattgcagccggtatgatcggtgttgctgaagcgatggcttatgcccaaaaatcaggcctagagccggaaaatgttctgaaaagcatcacaacgggcgcagccggaagctggtcattgtcaaatcttgctccccgtatgctgcaaggcaactttgaaccgggattttatgtgaagcattttattaaggatatgggaatcgcactagaggaagcagaattaatgggggaagaaatgccaggcttgtcgctcgcaaaatccttatatgacaagctagctgctcaaggtgaagaaaacagcggaacacagagtatctataagctttgggtgaaataaaaaaagattgcctgtacgaaacaggcaatcttttttttattattttccgatgaattgttgtgtccagatgcttccagactcaacgtagccaacaccgatgtgagtaaagttagggtttagaatgttttttctgtgtccttcactgttcatccaagcttttactacttcttctggtgtcttttggcccttcgcaatgttttcacctgctgttttgtagctgattccgaaagatttcatcatatcaaacggtgagccgtatgttgggctttggtgatcaaagtagtttttgtctttcatatcctgagattttgcgcgtgcggatttgcttaacgtttcatcaatttgaagcggctttaatccttgtttttgtctttctgcatttgtaagttcaacaacttttttctcatatgcacttacagatgaaggtgcagatgttgttgtgtttgttttttcagcagttgcaggtgctttagaagcagtgttttgatcagcagctgctttttcagtagtcttttgtgcaggttttgccgtttctgtcttttgaacatcctgaactttcacgttagattgcttcgcatgtttttgaagaagctgcttcatctctttttcgtttgcagcgtttaacgttttgatatttgtgttaatatgcagctttttcactgcatcgttaagtgacatgttttgtactgtgttccccgtttttactgtaaccacaggctggcaggagagttctttcgctgatgcttgctgtacgcccccgaatgtgaataatccaaccgcagcggcagcagataaaataaatgctttcttcattagttcgtaacctcctagagttgtttgtttctacagaaaaatcataacatagcttttttgtcataaagattccagcactttcctttgacaaatagagattgtcattttcgtaaagtaaatccgttgaatcactaagaataagggaatcagcggtatatatgattttatcgtaccgttacatagcttccttttttttgaaccgttagttatattttaatgtgtttttatattgacagcttttttttactccttttcgctgtaacaactattacaaaggtgttacaattaatctcagtatatgtaaatatattgaacgatttgagaggggtaaccagaagtgactgaaataggacgtgaaccaaagaaaaagagcaaaggaaacagagcaatcagaatgaacctttttttcctagctgtctttgttctattcactgcattaatttttaagctcggggttgttcaaattgttgaaggcgaacagcatgaagaagacgctgagaaatcaaatgcaaaaacagcttactatcctgcgcctcgcgggaagatgtacgacagaaaccagaaagttgctgtcgacaaccagagcgttccagaaattgtgtatgtatcaacatctagcacaaaaacagaagataaaatcaaaacagcgaagcggcttgcttctttcattcatattgataccgaatttttgaaggaaagggatctttgtgattactggatcgcagctcatccgaaaaaagccgccgctctgcttaaggaatcagaaagcaatctgaaaggagaccaagcttacaagcttcaaatagagcgtgttccggatcaagaattaaaggctattcagcaagatgacgaagaaatggaaactgctgcgatatatacaaggttttcaagcggaaatgcttacgaacctcaaatcgtaaaggcaatgaatccaaataagagcaatagcaatggaaaaaacggagcgctgcttgatgagaagaaaaactcctcgcaaagaccaaaaaatgacttaacatatgatgaaatttccattgtttctgagcatttagaagaacttccgggaatcgatatcgtaaacgattggacacgaaaatatccttatgacaaaaccctttattctgttttcgggggcgtcacgacacctgatcagggcctgctgagcgaccggaaagatttctacttaacaagaggctatgcgaataatgacagggtgggaaaaagttatttagagtatcaatatgaagaatatttaaattcgcataaagaaaaagtggaatacgtagaagataataaaggaaatgtcgtcagccaaaaaaccattgataagggcagcaggggatacgatcttcagctttcttttgacatggagcttcaggcaaaggtagaaaagattattgaagaagaagtaagaaacagccgtgcacgcggaaattacatgcttgacagagcctttgccgtaatgatggacccgaataacggcgatattttatcaatggcagggaaaaagatagatttaaaaaccaacaaaattgaagattatgcgataggggcatttaccacccaatatgaaatgggatcagcagtaaagggggccaccgtgctagccggctatcaggacgggatcccgcattataaatattttgttgacatgccactgtattttgcaggaaacggtaataagcctaagaagtcctatatgaatatgggaactattaatgaattaacggcattgcaaaaaagctcaaacgtatacatgtttaatgtcgccatgcacattgccggtgtcacatacaagccgcatggacctcttcctgctgaccagaaggatttaaacaaaatgagaaattactacagccaatttggcctgggagtaaagacaggcatcgatctgccgcaggaatcagccggtatgcaaactacacctgatgcggtaggggggttaattttagacttggccattggacaatacgatacatatacaccgcttcaaatggctcagtacatctcatcaattgccaatggggggtaccgcattcagccaagaattgttacaagtgttcatgagcccagcaaaaaagaaggccttgggaagaccattgaacaaagaaagccaaacattctcaacaaaattaacaactcagaaagtgacattcagcaggtgaagactggaatgaagctagttaccacttcgggaacagctagaaatacgtttgcagaggatgtttccggaaaaacaggaactgctcaaacattttattacggaacaaatcgtaattggtggggaaaaagcacgtacaatctaacatttgtcggctattatccgtcaaaaaatccaaaagtggctttcagtgttgttgttccttctgtagcgaacgaccacgacccgatcaacaaactcattgccaaaagagctatccacgcctacgcagagctcgaaaaaaaacacagtaaaaaataaaaaacagggtgcacaactaaaagattgtgtgccctttcttttattcaaaaattgacgttcaccataagaatagaaggagaatactcattttctagcgaatcatactaggtaaaagtcaatctgtatatgtcgaaacacgatgatcatgcaaaggagggattctgtggaacaggatacgcagcatgttaaaccacttcaaacaaaaaccgatattcatgcagtcttggcctctaatggacgcatcatttatatatctgccaactccaaactgcatttgggctatctccaaggagagatgatcggatcattcctcaaaacgtttctgcatgaggaagaccaatttttggttgaaagctatttttataatgaacatcatctgatgccgtgcacctttcgttttattaaaaaagatcatacgattgtgtgggtggaggctgcggtagaaattgttacgacaagagctgagcggacagaacgggaaatcattttgaaaatgaaggttcttgaagaagaaacaggccatcaatccctaaactgcgaaaaacatgaaatcgaacctgcaagcccggaatcgactacatatataacggatgattatgaacggttggttgaaaatctcccgagtccgctatgcatcagtgtcaaaggcaagatcgtctatgtaaacagcgcgatgctctcaatgctgggagcaaaaagcaaggatgctattattggtaaatggtcctatgaatttattgaagaagaatatcatgatatcgtgaaaaacaggattatacgaatgcaaaaaggaatggaagtcggaatgattgaacagacgtggaaaaggcttgatggcacacctgttcatttagaagtgaaagcatccccgaccgtctacaaaaaccagcaagctgagctgctgctgctgatcgatatctcttcaaggaaaaaattccaaaccatcctgcaaaaaagccgtgaacgatatcagctgctgattcaaaattccattgataccattgcggtgattcacaatggaaaatgggtatttatgaatgagtctggaatttccctgtttgaagcggctacatatgaggatttaattggcaaaaacatatacgatcagctgcatccttgcgatcacgaggatgtaaaagagagaatccaaaacattgccgagcaaaaaacagaatctgaaattgtcaagcaatcctggttcacctttcagaacagggtcatctatacggagatggtctgcattccaacgaccttttttggtgaagcggccgtccaggtcattcttcgggacatctcagagagaaaacaaacagaagaattgatgctgaaatcggaaaaattatcaatcgcagggcagctcgcggcgggaatcgcccatgagatccgcaaccctcttacagcgatcaaaggatttttacagctgatgaaaccgacaatggaaggcaacgaacattactttgatattgtgttttctgaactcagccgtatcgaattaatactcagtgaactgctcatgctggcgaaacctcagcaaaatgctgtcaaagaatatttgaacttgaaaaaattaattggtgaggtttcagccctgttagaaacgcaggcgaatttaaatggcatttttatcagaacaagttatgaaaaagacagcatttatataaacggggatcaaaaccaattaaagcaggtattcattaatttaatcaaaaatgcagttgaatcaatgcctgatgggggaacagtagacattatcataaccgaagatgagcattctgttcatgttactgtcaaagacgaaggggaaggtatacctgaaaaggtactaaaccggattggagagccatttttaacaacaaaagaaaaaggtacggggcttggattaatggtgacatttaatatcattgaaaaccatcagggagttatacatgtggacagccatcctgaaaaaggcacagcgtttaaaatttcatttccaaaaaaataaaacaacggcttaaacgccgttgtttatcgtctgcattgcttcacgtttttttaatacaaataattctaaacggttcaggccttctctcagcgtgtccagcgagtacgcaaaagacaatcttacatatccttcaccatatgttgagaacgagctgcccggcacgagtgccacaccagcgtcttccaaaagagccatactaaaatcaaatgaagtcattccaaatgatttaatagaagggaagatataaaacgcaccggacggtttaactacgtcaagtcccatagaaacaagacggtcataaacatagtcgagacgttttttgtattgttctctcataattagtgcatcgtcaaagccgtttgtgacagcttcaagcgcggctttttgagaaatggatgaggcacatgacacattgtattgatgaacctttaaaatgtgctttgcaatgtctttcggtgcgaataaaaatccaattctccaaccggtcatgctgtgtgattttgacaacccgttaatgacaatcgtttgatcccgcaaataggttgcgatggagtaatgcggtctgtcatatgttaattcactgtatatttcatcagacaatacgaagacatttctgccttttaagagagctgcgatgcttttcagttcttcttcagataaagtcacgccggtaggatttgacggataaggaagcacgacacacttggtgttggatgtcagagcatcttcaatcagccgggcggtaagcttaaagccgtgtgacgtagtatcaacaatgacaggcttggccccgcacaaattgataataggttcatagcctggataaataggtcctggcataatgacttcatcaccgggagataaaatcgtccggaatgcagcatcaagggcttggcttgcgcctgttgtgatgataatttctgattcagcatcatagttgaaatccgcttttttcttcatataaagctgaacagcttgtctcagctccaggtagccggcattcggagtatatgacgtcacgttttcatcaatggctttttttgcggcagctttcacatgatgcggtgtgaaaaaatcaggctggccgattgtaagtgaaatgacgtcttcgtgttgggctacaagattcgagaatttgcgtattcctgaaatttcgatctctcttgctttcggattcagcaaatgttccataattcatcaccttaacaaatataatgagtttatcctattttaccactagctgatcatttgtcacctttttaactgatatatttcgattgtatgcgccttttttctaaacatacctttcttttcagaaaaaaagaagacaaccagcgatttgattgtctttattgtatcatgttctattattgtttatatgtgccaatttcattaatagccataatcaaaatgaaggtcttcgtgccaaattagatacggaggatgctcttcttgaaggtcagctgattctttcttcatattcaggtaagtttcttcactgatatcctctaaaacagtcatttcgttttctttaaatattactaaggtacccattatttacacccttctttggaaaaatccttgactattttatcactgttagttggaaagtcaatggttattaggaaaaaagtttcttttttgaggaacgcggcttgttgccttcggaattcgattttgaagagctgccattcactttttacaaattacgccgatatatacagtacaatactgaatgcgaatagcgagggattgaattgtcgttacaacaatacgaaattttattggattctggtacaaatgaattagaaattgtgaagtttggcgtgggtgaaaatgctttcggaattaacgtcatgaaggtaagagaaattattcagcctgtcgaggtgacatcagtgcctcactcccatcagcatgtagaaggaatgattaaactcagaggagaaatcctccctgtgatcagtctcttctcattttttggagtagagcctgaaggatcaaaagatgagaaatatatcgtgactgaatttaataaacggaaaattgtttttcatgtcggctgtgtttctcaaattcacagagtatcctgggaagcgattgaaaagccgacatcgttaaatcaaggaatggagcggcaccttaccgggattattaagctcgaagacctgatgatctttttgcctgactatgaaaaaattatttatgacattgaatcagattcaggtgtagacacgtataatatgcataccgagggcttcgatgaaagaagaactgataaaaagcttatcattgtagaggactcaccgcttttgatgcgcctcttgcaggatgaactaaaagaagcagggtacaacaatatcgcttcgtttgaaaatggaaaagaggcatatgaatacattatgaaccttgctgaaaacgaaactgatttatcagaacagattgatatgatcatcactgatattgaaatgccaaaaatggacggacacaggctcacaaagctgctgaaggaaaatccgaaaagctcagatgtgccggttatgattttctcatcgttaattacggatgatctgcgtcaccgcggcgaagttgtaggcgcagatgagcaaatcagcaagcctgagatcagtgatttgattaaaaaagtggatacgtatgttattgaataaataaaaacagccgttgccagaaagaggcacggctgtttttattttaaaagtaactctcgccaagttttttaaagaccggtttatggtaagctggctgctggcgatttggcactagcggcttttctttcatgccgacatattcttgcaataggtgtttcgcttttgttaaagacatttgagctttaggatttcggtacgattgattaagtgtacctaaatgcggaagatgttcgaagtcttctttagttggaggcatgtgaaaatagtagtctccgattgagataagcacgtccgattgctgttggctgaaccttggattttttgaaaaatgaagccctattttctttcctttaccttctttgacaagcttttgcaaagcccgttttttcagcagatataggtatttagggttgggggcggtttttgcatggcggttcacagtgtaaactgcttttgaaagattttctacggttggctgcagatctttcgtatatgcatggtcgtccattatttctctcctttgctcttatcaatttctatatgtttagattatacttttttaaagttgaaatgcaaatattgaatgtaaaaatgcgcttttttctaagaaaaaaagcgcatttttaacctgcattatacagatcttgccttctttttcggctgttcttgaaatgcttcctgaacattcacttccacagcctgagcactgtattttggcagtgcaataaaataaaaaataaaaacgagcaggataataacacccatcccgtaataaagataatcaatgtttgaaacaaacttagggaataacagtgcgactaagccgagtgtcaaagactgtgcaaacatcataaaagggtcctgcatgccgcttacacgtcccatcagttttggatgaacaatttttggcatccaccctccgattgcaatgttgatcggtccgatgcacattcccagtgcaaaagctgccgcgtaatacacccataaaatattggtgtagccgaggacgaagatcagcaaacctgcaatgaaaatcggtatcgacattaaaaagtgcggcttcacttttttagagatgatcgtgccgattacgctgcctgccagcagcccaaacccgagtgcgatcgtaaatacagacgtatgccactcataacggtcaggcgccaatccatatttcattgtaaacatcggcaaaacggcgaatcctccattgacaaatccaaaaatgaagaagccaaaaataagagatgccagcaatttgttttttaaaatatagaggatgccttctctaaagtcatttattgaatccttaacagaagtctttctccagctgaatgcaccgtttggctgtcgggcttcttttggaatccggcagctgcggatcagcagcccggaaatgataaagctgacaaaatcaagaataatggcgccttcaataccgatggtgttgtacataaacgcgcctataccgaccccaaacaccataaaaatgctaaaaagcatctgattaagtcctgccgctttcacataatgctccttcggcagaatggcttgtaccaaactgttttctgccggaaagaaaaactttgttacagcgcttctgataaataagatacaaaaaacaagaggaatattgccggtaaataaagtgaaaaaaagcacgacagtcaggcctgctctgatccaatcacaattttctgccaccttttttctgtcaaaccggtccgcgacgactcccacgatcagaaatacaaatatggtcggaagagaatacatcagctccgccaaggtcgtatatgaaggctggctgctgaatcggtccagcaaaaaaaaagcaaaggccatgttgcctactgtcgtgcccatttgagaagcgagtgctgcgaaaaatagacgaacaaaattacgatttttaaatatatccataaaaacgctccttaccctaaaggtcccactttatcatattataaaccgcctgtttttgaaacaaataagaaaacattaccggttaatcgtgactctcgttccgtttggcacaattgaagcaagttcgatcacgtctttgttatgcatgcgaatgcagcctttagaaacagccttaccaatcgaagcgggattattcgtcccatgtattccgtagtgctgctttgaaaggctcagccaataagcgccaaatgggccgccgggattgcgctggcggttaataatgtaaaactcgccagtaggcgtttgcgttagtattttaccaacggcgatgggataggttttcattacccgattatttaggaacagcgtaagggtcttcgctccgattgagactgcgatatgatacggaattgtataagggtccggcagtccggggatgactatggactgtcctgcggtgagccctgcctgcagtgacggattagcctggagtaatgcagccgtgctgattctgaaatcagccgcgatgctgttcagtgtatcaccttgcttcacctggtacgtaagcagtttcctcatcctccttttttacttataagtattgatggggagcccatcctgctacattaatttgctttttaaggtgaagacagtgatttcaggcttggccagaaaccgcaaaggcagcctggtcatcccgaggcctcggtttacgtaaatatgagtgctgcccgtttgatacattccctctgtgtagacttttccatatggaggcgtaataatcggtccgtaaaaaggcagctgaatctggccgccgtgtgtatggccggaaagctgaaggttcacgggataatctgttgttttcaaggccgcatcaggttcatggacgagaagaatggaaaaaagtctgtcgctcagccttgaaagggtgccttcataatctgggtttcccagcattaagtcatcaagcgaagcaatctcgattttgctgccatctgcgagtgacaatgtttgatagccattgcgatataccgtgaaacctccggccgtcatcaggcttttgtaaacggcagttccatagcctccgtgatcatgattgccgtaaatacaaagcttgccgaagggagcattaagctttctcaataatggaatgactgcctggtggtgctgatacgtatcaggattatcaataatatcacctgtaaaaacaatgagatcaggtttagattcattaattgtaagaatgacagtttttaaatcttcgagagtaaagtaatcactcaagtgtgcatcgctgaactgcacgattttaaaaccgtcaaatccgtgcgggatgagagagctttttattgtgtgttcggttgtctcgatcatatgcggctcgagatacctggcatagccatatcccccgccggccgttaaagccccggcagcaagagcgccgaacattccttttagaaattgtcttctggacatctttttcatttcaaaccaacctttaatagagtttttctattatatcatctgtatctgataaaaatctcatatgagcatgtgctgacagaggcagggatataatgatagaatattattgaatgaatactcattcacaattggagggataaacatggaaaaaaaggcggtaattattaccggcgggtcaagcggaatgggaaaagcgatggcaaaaaaacaggctgaattagggtggcacgttatggtgacagggaggaaccatgaagcacttgaggaaacaaaaaaagaaattgagacctttgaggggcaggtcgcttgttttcaaatggatgtccgttccgattccgccgcttcagacatgataaaagaagcgataaaagcctttggccagcttgacgcgctaattaacaacgcggccggaaactttatttgtccggcagaaaagctgacgcccaatggatggaaagccgttattgagattgttttaaacggcacatttttttgcagccaagcagcggcaaggcattggattgaccagaagcagcagggtgtcattttaaatatggcagccacgtacgcttggggagcgggagcgggggtcgttcattccgctgcagccaaagcgggggtattgtcattgacaagaacgctggccgttgaatgggggagcaaatacggcattcgcacaaacgcgatagcccccggaccgattgaacgaacaggcggtgcggagaagctatttgaatcggaaaaagggatggcccgcacgatgaacagtgtgccgctcggccgattgggcacaccggaggaaatcgccgctttggcagcgtttttgctttctgatgaatcatcctatataaacggggattgtatcacaatggacggagggcaatggctgaatccttatccgttttaaagaatattaatctttggattcaatgtggtataatcagacaaagatagagaagcaggtgataacatgttggatccacttgatattttaacgaacattgatgatgtccttccatattaccaggcgatttttagtgccgaggagcagaaggttgtcggatatgaggtgcttggacgaattttggcagattcagaaatccaaagtctcgggcccttctttttagatgcggggatacccgaagaatataaattagaggttgataacagaattatccgccaggctcttgaccgctttttagagtcggattctgatctgctgatttttatgaatcaggatgccaatctgctgatgctggatcatggtgaaagctttctggagcttctgaaagaatatgaagcgaagggaatcgaactccaccgttttgtgcttgaaattacagagcacaattttgaaggggatattgagcagctctaccatatgcttgcatactatcgtacatacggaattaaaatcgcagttgacaacatcggaaaagaaagcagcaacttggacagaatcgcgctgctctcaccagatctgttaaaaatcgatttgcaggcgctgaaagtgtcacagccgtcaccgtcatatgagcatgtgctgtacagcatatctttattagcaagaaaaatcggtgcggcgctgctgtatgaagacattgaggcgaacttccagcttcagtacgcctggagaaacggaggccgctattttcagggctattacttggtgtctccatctgaaacgtttctagagagagatgtattgaaacaaagacttaaaactgaatttcaccaatttatcacacatgagaaaaagaaactggagaccgtctatgagcactctgaacagttttacaaacgagtgcatcaggctgtgacctctttgagaaaaaacaatctgtcttctgatgatgactttattaaaaagctggcggaagagctgacagattgcagcttcaggatttacatgtgtgatgaagaaggcgatcagctgacgggaaatgtgtttaagcaagatggagaatggatttatcagccggaatatgcggaaaagaactggagttggcgcccttattttctggagaacattatgagaatgagaaatctcagaaaaggttttttcagtgatctgtacagtgatttggaaacaggtgaaatgatcagaacgttttcatatccgatggatgatcagatgtatttatttatagacttgccttattcttatttatatgagcaggacggactgatttaacggctgaaaggccgttttttttatgaaatgaaaaaaatatcaaaaaacgattgacattgatactgagaatcattatcatttaattatagagagaagctactctctgttccccaacccctctatcagatcaagatccgaaaaaacttggcgctacccccgccaagttttttatttgtcaaagcataggacaatccaatgaaacaataaacctaactagtggtaaacgtttaacactgggagaaacattcagtgccgaacacccctgacactgctgcacgggtgaggaggaaaattcgttctgaaatgtttatttcagttccgttgtttgcctctatccagcatgactcccattgattatggccacgcgggacttcaccataacattcaaaagaaggttttgacaaagttgcaaaaaggcattcttaatgctgccaaagattcgaaaaaaattataattgtgtgcatgacattcaaaaaaagcctcaaactaaagaaaaatcgtttttttcactttttttctttgcttaaattcagcagtgaaaatgccatcctgtccgactttatggtatgatgctcaatagaacttgtattataataaatacttgttgatttgaagttgctttttgaaaggagtctttttttagaatgtcacaattaatgggtatcatcacacggctgcaaagtctgcaagaaacagcggaagcggctaacgagccaatgcagcgttatttcgaagtgaatggtgagaaaatatgcagtgttaaatatttcgaaaaaaatcaaacgtttgaactgacggttttccaaaagggtgaaaaacctaacacgtatccgtttgataatatcgacatggtttccatcgaaatctttgaacttcttcagtaagattcctgaaatagggggaacaagcttccgcctttgcaaaagtaatcgaaataaacggtaaggaacatacttgtttcatggttgtaaatccttgaaaaggagtgtcgtgatggctgattcttttctgttttataatctttcagaagcacagatgacctttcaagatgtgatggaacggcttaaagcctttgttcaaaaggacccccgttcttcttatgtgttatcgatcggaaccgattcacaggtttaccgcgattacacaaagtttattaccgcattgcatttgcatcgtacaggcaagggagcttggggctgcttaaaaaatcatacagtcgacagacccatacatagccttcgggagaagatttcgttagaaacggcgtacagccaagaaacggccgctcatattcttgatggacacttaatggatattaccgatctgctcctgccctttaccggtgagggggcggatcttacctttgaagttcacttggatattgggaaaaaagggcttacaaaagatctgatccaagaaatgactggacgtattacctccatggggattgaggccaaaataaagccggattcatacactgccttcagctatgcaaatcgtttcacaaaataatttggctgaaaaagccaaggtaaatgtcgaattatgcggttgacgtttgttatctgattacttattctagcggtagagctgaaagtaagttgtcttgctttcagaggtattcagtataaaacagggggcctgattgcgaatgagtcttatcggtgaacgatttacagaagaagaacaaaaacttctgctgaatatcctgatcaaccatgagtatgccatcgagctattaagcagtgagatcaacgatatagagacagggaccaaaaacgttgacggaaccacctacaaaaaacttgtaacgctatacgaccgatttcgatttgaaaattaatgggacaccctataattgatactccacaaagagtatcttttttattgaaaggaaacttttcgacaaatactgataaagtttatattattgcaatatagggaatgtattgatgatgaaaatgaaaaggggtcgaaaacatgataagcttacaatcagatcaacttcttgaggcaacagtcggacaatttatgattgaggcggacaaagtagcgcacgtgcaagtcggaaataaccttgagcacgcattattagtattgacaaaaaccggatacacagccatcccggttctggatccttcctaccgtttacatggcttaatcgggacaaatatgatcatgaacagtatttttggacttgagcgaattgagtttgaaaagcttgaccaaatcactgttgaggaagtcatgctgaccgacattccgcgccttcatatcaatgatccgattatgaagggattcggcatggtcattaataatggatttgtctgtgttgaaaatgacgagcaggtatttgaagggatttttacgagaagagtcgttttaaaggaattgaataagcatatacgctcgttgaataagtaggctgtacggcctatttttattatatagccagagcgaaaaaaagaaagcgcatacataatttaaacgagaatagggcttgaataagaaactaagattttattagaatgggagataagaaaaacttattgataacaaaaaggaggacgacatgcagcttcaagagcttcatatgctcgtagttttagctgaggaattaaatatgagaaaggcggcagaacggctttttgtatctcagccggctttatctcagcgcttacaaaccattgaaaaggcgtggggaacaaaaatctttttaagatcccaaaaaggattaacggtaacgcccgccggtgagaaaatcattcagtttgcgaatgatgtgacattagagcaggaaagaataagagaaaatattgacgagcttgaaggtgaaattcacggcacattgaagcttgccgtcgcctccataatcggtcagcattggctccctaaagtcctgaagacgtatgttgaaaagtatccgaatgcaaagatctcgctcataaccgggtggagcagcgaaatgctgaaaagcttgtatgaggatcaggttcatatcggcattataagaggcaaccctgagtggaaggggcgcaaagattacttaatgacagatcatctgtatttagtggatactgaaatttcctgcatcgaagatattgcccatacagaacggccgtttatccagtttaaaagtgacagcacttattttcaggaaattcagcactggtggcatcaaaaatttaaaacgtcgccgaaacagacgatattggttgatcagattgaaacgtgcaaacagatggcactgcacggaatcggttatgccattttgccgtctgttacccttcaaaatgaagataaagtgaataaaatgcctcttttagacatgaaagggcatccgatcggtcgggatacatggttattaggttatgagcctgcctttgaactgaaacaagttcaagcttttgtacaagtgataaaggatatgctggaccaggaaaatccattttaaagacagcgaggtgctgtctttttttttatttatctgttgacaatgaaaatcattatcatttaaagtgatacatatgatattgaaaatcattatcaattaatggggtgataacatggctaaagccttgattacatatgccagcatgtcaggaaatacagaagacattgccttcataataaaagatacgcttcaggaatatgagttggatatcgattgtgtcgagatagatgatatggatgtgtcttgcttaacctcctatgattatgtactgattggcacctatacatggggggacggcgatttgccctacgaagcggaggattttttcgaagaggtcaaacagcttcagcttcatggtttaaaaacagcctgcttcgggtctggcgattattcttatccaaagttttgcgaagcggtgaatttgttcaatgccatgctgcaagaggcgggagctgctgtttaccaggaaacactaaaaattgaattagcgcctgaaacggatgaagatgtggaaagctgccgagcgtttgcgagaggttttcttgcatgggcagattatatgaacaaggaaaaaagccatgtttcataaaggagcaactgctgttacggcatcggcgttttctggatattttgtggcggtacaaagagaaggcatttttcattattctttggagcagggctggagaaagctttttcgtttgaaaagtaagatacactgtatcagctacatagggccttacttatttggtgttggtgaaaagggaacagtcattcgttcggctgatgaagggaaaacctggacgatgtcgagctttccgacaaatgcaacagtgtgggcgattaccggcagaaacaacgggtttgtctgcgcccacggtaagcattgtatttatgtatcggatgattttggtgtctcatggcgcgtagccaaaccttttgccgaatttcataatccccctgttatccggtcgctatgccttcacgggggcaatctttttattggcacgcaaatacacgcatattttggcggcatttgggcttacgacattaagcgtgacactgtccaaattgtcaaaaaagaaaaaaaacggatgacggcatccatgctcgtgttcaatgaaaattggctggtggcggcgatgggttctgtgaaaggaaagcacggtgctgtcactgtacggaatcttttgaatggtgaagaattcaccatacaatccagtatgatcagaaatgaagaatcatttcttgatctttcagaggatgatggcattatatatgtcactacaacacaagatgaaaatggtttttcgagaatttaccaggttgatctcgaagcccgatcgttaaaatggttcgataccattaaggggcatggatggagagtggccaatcagaaagagaatttcttttgcgcaggcttgtatgaatgtaaatttgtccagccgtacgaagtttcagcaatgattcattagaggaggaacaaggaattggcgaagattttgctcgtttatgcaacaatgtcaggcaacactgaagcaatggcagatttgattgaaaaggggctacaggaggcggaagcagaagtagaccgtttcgaagcaatggatattgatgatgcccagctgtttaccgattatgaccatatcataatgggaacctatacgtggggagacggagatctgcctgatgaatttttagatctggctgaagacatggatgagattgatttttccggcaaaacatgcgctgtatttggttccggtgatacagcatatgaatttttctgcggagcggttgatacgctagaggcaaaaataaaagaacgcggtggagacattgtgctgccttcggtaaaaatcgaaaataatccagaaggtgaagaagaggaagaattaataaacttcgggagacaattcgcaaagaaaagcgggtgcgctgtctgatcactcactgggaactgctaaaacggctgttcctttttttcttgtctttgtatctttcctttgatacagtaatgaggtagaaaatcaggaggaggactatacatatgaaaatgatggacgcaaatgaaattatttcatttattcaaaatagtacaaaatctacacctgtaaaggtttacgtgaaaggtgagctggaaggaatcaatttcggtgaatctgcgaaagcttttatcaacggaaacactggtgtcgttttcggtgaatggagcgaaatccaaacagcaatcgaagaaaaccaaagcaaaatcgaagactatgtggttgaaaatgaccgccgcaattctgcgatcccaatgcttgatcttaaaaacatcaaagcgcgtatcgagccgggcgcgatcatccgcgaccaagttgaaatcggtgataacgcagtcatcatgatgggtgcttctattaatatcggttcagtcatcggcgaaggcacaatgattgatatgaacgttgtgcttggcggacgagctactgtcggaaaaaactgccatatcggcgcgggttctgtacttgcgggcgttattgagccgccatccgctaaaccggttgtgattgaagacgacgtcgtaatcggcgcaaatgctgttgtgcttgaaggtgtaacagtaggtaaaggagctgttgttgctgcgggagcgatcgtggtaaacgacgttgagccatacactgtcgttgcaggcacaccagctaaaaaaatcaaagacattgatgaaaaaacaaaaggcaaaactgaaatcaagcaggaattacgccagctgtaaggaaaagtttgataaaaaaggcgtggataatatatccacgccttattcgtataggcaggaggaatagaaatgaagaaagaggagctcatcgcaattcgcagagatctgcatcgtataccggagcttggatttcaggagttcaaaacccagcagtatttattaaatgtcttggaacaatatccgcaagacagaattgaaattgagaaatggcgaacagggctttttgtaaaagtgaacgggacggcgccggaaaaaatgctggcgtacagagccgatatcgatgcgctttctatagaagagcaaactggtcttccattcgcatcagagcatcacggcaacatgcacgcctgcggtcacgatttgcatatgacgattgcactcggcattattgatcattttgttcaccacccagtcaaacatgatttgctttttctgtttcagccggcagaggaagggcctggcggtgcggaaccaatgcttgagagcgatgtattaaaaaagtggcagcctgatttcatcactgcgcttcatattgctccagagcttccggtaggcaccattgcgacaaaaagcggccttctatttgcgaatacatcagagctagtcatcgatctggaaggcaaagggggacatgcggcatatccgcatttggctgaggatatggttgtagcagcaagtacacttgtcacccagctgcaaacgattatctctagaaacacagatccgctagacagtgctgttattacagttggtaccattaccggaggctcggcacaaaatatcattgcagaaacggcccacctggaaggcacgatccgcacgctttctgaagaatcgatgaaacaagtaaaggaacggattgaagatgtagtgaaaggaatcgaaatcggattccgctgcaaaggaaaagtgacatatccgtctgtatatcaccaagtttacaatacgagcggattaacagaagaatttatgtcttttgttgctgaacatcaactggcgacagtaattgaagcaaaagaagcaatgactggagaggattttggctacatgctgaaaaaatatcccggcttcatgttctggctcggcgctgattctgaacatgggcttcatcatgctaagctgaatcccgatgaaaatgcgatagaaacagcggttaatgtcatgacaggttatttttctgtttatgccaattaagcacaaatgaaagaataaaattccataaaatgagcactctagtaaacggaggtgttcaaaaatggctaaaaaaattggaattgaacaatcgttatcagatgtagaagctgctttaaaagaaaaaggatatgacgttgtaatgatgaaaagccctgctgatgctcaaggctgtgactgctgtgtcgtaacaggtcttgataataatgtgcaagggatagccgatacggtaacacaagcacctgtcattacagcttccgggatgacggctgaagaaatttgcagcgaagttgaaagcagaattcagtaatataaaaaccgaagcaaaaagcttcggttcttttatttattctgtttctttagggaaagcgcggtcgaacgcgttctttatttcttttctcaacactcgttcgactcgccactgttccatattttctgttttggcaatgaccctgattacaatttcggaagtccccagttcttgaatgccgatgacatttgggccttcttttatttgtggaagagccgctgcagtttcatcacaaacctgctgtaaaatatgaatcatttcatcaatatttctttcagccggcactttaatgtcaacaagagcctgcatggtaccacgagaatgattgctcacgtttgtgatgtttctgttggggatgtaatgcagtgttccgtcaaagctgcggatttgagttgtccttaagccaacctgctcgacaattccgtcaaaggtggaaacggtaatataatctccgacatccaattgtttctcaagcaaaataaaaaaacctgtcacgatatcactgacaagcccttgggcgccaaatccgacagccaggccgacgattcctgcccccgctaaaagagcgcttggatcataatgaaacaaatctagaaccatgacgaaaaatatgaaaatcaatgtataagcaaatatgttaagagtcaggcttcggagcgtatgtgcacgtccgatagacaagctattctgctcctcgaattttgcaaacagatgtttaatgattttcatgcctaatgatcgaacgataaaatagagcaatatcataatggcgagtttaatgagcagaacaccggcatttgtaatcagtcccgcccaatcatattgtttaataaagtccatgttgagctccttttctaattgattgctgcacattgagactagttaccctgtacatgaccatgttaaacgttttattcaaaaatgtcgaagccaaagacatacatgatttgttaaaaattgactcaggaaatctgcttttatataatggcattgcaatataactaaaaatggttaatcaccctttattttcatgcgattttgacctttaagccaaacaataaattggagggatacatatggcagaacgtatggtaggtaaacaagctcctcgttttgaaatggaagcagtccttgcaagcaaagaattcggcaaagtaagtcttgaggaaaacatgaaaaacgacaaatggacagtgctgttcttctatccaatggatttcacttttgtttgtccgacagaaattacagcaatgtctgaccgctatgacgagttcgaagatcttgatgcagaagtcatcggggtttcaactgataccatccatactcatttagcttggatcaatacagaccgcaaagaaaacggtcttggccagctgaaatacccgcttgctgctgatacaaaccatgaggtatcccgggaatatggcgttttaatcgaagaagaaggtgtggctttgcgcggattgtttattattaatcctgaaggggagcttcaatatcaaactgttttccataacaatattgggcgtgatgttgatgaaacgcttcgtgttctccaggcgctgcaaactggcggactctgtccggctaactggaaaccaggccaaaaaacactttaattctttccaagaacgaaaagcggtctagcatattcgttaggccactctgttaaataggagggaaaaagcaatgaaattacgtcagtccatgccggaattgacgggagaaaaagcttggttaaatggtgaagtgacgagagagcaattgattggggaaaagccgacgcttattcatttctggtccatcagctgccacttgtgcaaagaagcgatgccgcaagtgaatgaatttcgtgataaatatcaagatcagctgaatgttgtagctgtacacatgccccgttccgaagatgatcttgaccttggtaaaattaaagaaacagctgctgaacacgatatcactcagccgatttttgttgacagtgaccatgctttaaccgatgcatttgaaaatgaatatgtacctgcatattatgtgtttgataaaacaggacagctccgtcacttccaagccggcgggagcggtatgaaaatgcttgaaaaacgtgtgaaccgcgttctggctgaaacggaataggtatctgactaaatagtatttcctaaaaacctgatcacatcaggttttttatttgtgcaaaaagcaatggaagaagagtaagaagcttatttttccaaatttgggtataggaattgatggtttgtttgattgatacgctagaaaacacagctaatttttgatgtttttcctcaattttagataaatctcatatctcataactcgaaaattgtagatattacactaaatttctttaaagaagtaagtaaaatatatattttcaacattataccaaataaactagaaagccccttaatcccttgagaataaaggactcttttgaaaaataaaacattttcagaaaataaggaatttttcatagagtaaatataatagtaaaatgctaaaataatagttgataaaattacttttgtaatctaatatcttaattaaagatgttaattttgatagggggtacattgaggaatgtttaatgaaagagaagctttgcgcttgcggttagaacaattaaatgaagctgaagtgaaagtcattcgtgaatatcaaattgaacgtgataaaatatacgcaaaattaagagagctggacagaaatggaagcccttccgaaatcaaaaaggatttccgttctgaaaaaaaacctgactctctgccggttctcgctgagcttgcggctcaggaaatcagaagctatcagccgcaatcacagcagcagtctgttcagcctcagcttcaatctatttcctctcttcctgccggtataccagacggaacaacacgaagaagaagaggaacggcaagaccgggatcaaaagcagctaagctgcgtgaagctgctattaaaacattaaaacgccacaacgcggcgattaagagctcggagcttcaaaaagagattgaaaaagaaagcggtcttgaaatccctaatatgacaacgtttatgcaaagcttaattaaaatgtacccggaagtgaaaaagccatatcgcgggcagtacattttagagggtgaaatcgaatctgcagaatcagcaaatgaataaatataaagaaaaactgcttggcatcgctcaagcagtttttttattgaggttttttctgtgaaggtttgttttctttttcaagattaagcttatacacccacttttgataaggcttttcttcagcggctctgtttctcagctcttcgattgtatggctcttggcctggtctgatgattgggcgtgggcaagctgtttttggagcacatgtatctgtttggtgacatcttcaaggatggtctctacatgatatggctgcgcgtaggccgctggagcttcttcttccgttttttctttttgtttcgtgccgccatcaatatcggcaaaatgagaagcaatccaggcatcgctttcatcaagctgccgtttatacgatataatagtttcgtgaaataatttttctttcgttttttctatgtctagcagtctttctttcgtttctatgattcgatctttcatatgatcaacttctattttaatatgttttagctgatattctttttctaccatttgctcttttagacgcccgttttcggcttttatcaattcggcttgctgttttgcctgaagcagtgcattttgttcctgctcaatcgaggcttgaagttcgctgatccgtttatgaagatttttattttcttcttcgattttgactttcgcaatatgaagtttatgtttttcttcgatttcggctctgcgtttataggtttcagcagatagaagctcctgcaaaacaacgattttatcaagcagttcagctcttatttggtgcagggtttggctggtgtgggaggcatgtttttcttttgttgacatatgtgttaattcggcagacagctgctggagtttttctttcatatcggtattttctttgagcagtttgttatttttctgatgaaagtagcttgcttcaagttcagaaatcagcttatggcaccttgaaagctcggattttaaataaaggttctcctgagacacgtcgtggaaaaaaggacctgatcttttcattcgaaccatctccctcatgatgttaacactacaatatgcaaatactgaacagctattcctctttaataaacagacaagcagtagcgttgagcctttgcttttgctatgcttttaacgaaactagaggtgagatgatatgaagcatgtaaacgtactgctggcagggggagcctcgcggcgatttggagaaccgaaggcgtttgtcaaatggaagggcaggatgctttacgaatgcgctaaagaggcacttggagaacaaacggttatcatcagccgtcccgaatttattgatagatttcaagaaaacggtgaaaatgaagtgtatcaagatgctgagccatttcaaggcatggggccattggctggtatatataccgcttttaaaaagacagacggtgatctttatactgttctttcctgtgacacaccgctgatacaaagaaggacgatactggagctcaaacgtctgatgactgccggttcggacgcggtagtcccaatttcagacggacaagtgcagccattgattgcgatttaccacaaacgtatcatgccagttctatacgatcagctttctgagaagaggttgagaatatcagatttattaggcagaatttcggtttgttacgtacaggctgaaaatatcggagcaaacccggcagagtttatcaacattaatacacgtgatgattttagctgtttggaagaaaaatcgaactccctcaagcgggactgacggggcaataacatgataagatgacataaaagataaggagaacaggtttgatggaggaacgttattcacggcaaatcagatttaagcaaattggggaagagggtcagaaaagactggcagacagccatgtgctgattgtcggagcgggagcgctcggcactgcaggagctgaagggctttcgagagcgggagtcggtacgattaccattattgaccgtgactatgtggagtggagcaatcttcaaaggcagcagctttatacagaaagcgatgccaaactccgcatgccgaaagccatggctgccaaagagcatctatcagcgattaacagcgagatacatattgaggcgtatgttaccgaaggaacagccgaaacgcttgagccgctgattgaaaaagcagatgtcgtgatcgacgcgacagataattttgaaacccgcatgctgataaacgatcttgcccagaaaacaaagacaccttgggtctatggcgcctgtgtaagcagccagggaatgttcatgactgtcattcccggagaaaccccttgtctgtcttgtttgtttgagcaaattcctgtcggcggggcgacgtgtgatactgccggcattattccgcctgctgtgcatatcgtttcagcatatcagcaggctgaggcatttaagctgttaaccggccaaatagaagcaatacagcggggttttgtgacatttgatgtctggaacaattcgcatatgaagattaacgttaatcatgtacgccgtgaggattgcccatcttgcggagcaaatgcggtatatccttatcttcaggattggaatacaccaaaagctgctgtattatgcggccgtgatacagtgcaggtaaggtcagaatcattaaaaagaatcccgaaacaggaactcattaagcggctgaaaacaatcggcaaggtcgaggctaatgcgtttttgctgcatattttttacgaggatttcagaattgtcattttcaatgacggacgggcactggtgcatggaacaaatgatgtgaaagaagccaactccgtgttggcaagagtgattggactgtaacaacaggaggggtcagaatgctggagaaaagaacaccgataccggtagacgaggcagttcggcgtgtctgccattttcaaaaacaaggtgaaacagaatgggtggcgcttgaagacagccttcatcggtttttagccgaagatataactgcggatcaccacgtacctgcgtttgaccgttcgccatacgatggttttgctgtcagagcgtgcgatacggcagaagcttcacgtgaaaacccagttcggtttgaagttattgaccatattggagcaggagcagtatctgaaaaagaacttggcccgtttcaggccgtgcggattatgactggcgcgcaaatccctgaaggggcagatgcagtcgtcatgattgaactgactcaaacctttgaggagaatgggaagtcatttatgtctttaaaacgccgctttcagacgggggataatatttcaaaaacaggtgaggacgctcaaaaagggagtgttttactgacaaagggcacccgggtgacaccaggagtgacggctcttttggcaacattcggatacgcatctgtgcctgtcgtgagaaagcctgtagtcgggattatcgcaaccggtaccgaattgctgaatgtcagtgatccgctggaaccgggaaaaatccgcaacagcaatgcgagtatggtatatgcgcaagcgatagaagcaggcgcaacaccgctttatttagggaaaatctctgatgaattggataaaagctttgctgcagttaaagaagcgatgaaaaaggtggacttcctgatcacaactggaggtgtgtcagtcggtgactttgactttttgcctgcgatctatgaaaaactcggagcggacgtgctgtttaataaagttgccatgcgcccgggcagcgtgacaacggtggcgcatgcaaacgatatgctgctgtttggcctttcaggtaatccgtcggcatgctatgtcggttttgaactgtttgtcaaaccgataatccagacatggttgctcaatgaaacaccgcattcgatttgtgcggaagctgttttgaccaaggattttccgaagccgaacccatttacccgatttgttcgtgcgctcgtgcaccatcaggaagggaagctgttggcgacacccgttggcttagataagtcgagctctgtcacatcacttgcagatgccaatgcatttattatcctgccgggcggcacgcgaggctacgaatctggcagaacggttcaagtgctgctcatcagagaagagaatggaagtgaatggccttggtccgtcctttcccgatcgtccaagttgtaggatttcaaaacagcgggaaaacaacgtttattgagcgcattcttgaaaaagcctctgaacaaggagtctgtttgggctgcctgaagcatcatggtcacggcggtgaaccgcaagcgctcacggaaggaaaagacacggaccgttacaaggcggcaggtgctgatgtaacagcggtagaaggtgctggtgtgttacagctgactgcccgccgcaattgggatttggcacggctgatcgagttataccaatttctcgaaacagactgtcttctgattgaaggctttaaaaaagccccttatcctaaagtggtaattctaagtgaaaaggaagatctggaagcgctgcaagcagtaaatataatcgccatcatctatagaaaaaaagagcatatgacagagcatcagggattacccgtttttcatgcggatgatccggttgccgtggattttgtgctttcacagctgaagggggaatctgcataatggaacggtttgagattacgaaaacacccattaatactgaagacatcattaaaaaagtggagaaacgggaagcaggagccattacgacatttattggtacggttcgggaatggacaaacggaaaaagaacggttcggcttgaatatgaggcatatgaaccgatggccgtgcaaatgcttgctcaaatcggcgctgaaatcgaagaaaaatgggaaggtgcctcagctgcgatcacgcaccgtataggtgtgctcgatatcggtgaagcagcggtagtgattgctgtatcttctccccatcgaaaagccgcatatgaagccaatgagtatgcgattgaacgcattaaacagattgtgccgatttggaaaaaagaaatttgggaagacggtgagcaatggatcggcgaccagctagaaacaacagcttatccgaacggaaaaccagatctaagcgagggagaccagcatgattaaaattcttttatttgcaggactggctgaacaggccggtacacaagcaatagaaatagatgtggaacaagcaaccacagatgaaataaaagcgagtctaaaagaacaatacggtcttgaatctattgatacgtctatgattgccgttaacgaaagctatgtaaaagaaaatacctctgtatcttcgggtgacacggtagccgtcataccgccggtcagcgggggatgaaaaccggacggcatttcagccgtccggtttttctgtatttcattggcatatccccaagtatcctcagcatacaatgattttctgtaagcgtttattctacatatgttactccctataaagtaagagactcactccataattagactgaaattttgaaaaataatagaaatttatttcgggtatcgatatagtgaagatgataaatgttggaaaggtgctggatatggagacatttaaaagattaaaaatgtattattggccgtacagaaaagtgtttatgtggtcgcttctagccatgcttttgatgactgcaattactgtcgtttatccgattatcctgcaaattacgattgatgagatcgtgctgggacggcagtatcagcttgcggcgtgggtcagcttaggatttattgcggtaatggttttgaaaggaatggctaccttttttcatcagtatttaggtgatatgttcgggatcaaatccgtttatcggctgagaaatggtctgtatgaaaaactgcagcggctttctttttcttactatgataacgcgaaaacaggagatttgatgtccaggctgactgctgatgttgaagggcttcgttttttcttatcatacggtctcgctgagctcattcgcttcggcctgctggtagccatcagcctgtcggttatgttttactattctgttcctctcacgcttgtgacaatagctgttctgccatttctcgcggttgcggtataccggtttgacaaaagagtccatcccgccttcagaggcatccgcaaatcgtttgcgaaactcaatacaaaagttcaggaaaatatcagcggcattaatacggttaaatctctttccagggaagattttcagatcagcactttcaataaagccaatgcagaatacagggcgcagtatttacaaacatcatccatctggtctgcgtatttccctttaatggagttcattggtaacatttgtattgtagctcttctctcatacggcggttacttggttatgcaaaatcagctcaatcccggcgagcttgttgctttcttcagccttgtcaattatatgatgtggcccattatgaacttaggttttgtcatcaatatgttctctcaagcaaaagcgtcaggggaacgcctgctcgacattctggaaaaagaagaagacattacaggtcatcctcatgctttgcataaacaaaaattaaccggagatgtccatttcaaaaatgtttctcttgcatacggaaaagaacaaacaaacgcgctgtgcaatgtaagctttgaggcaaacagcgggaaggtaatcggactgttgggcccgacaggttcaggcaaaagctcagtgacacagcttctcaccagattttacagtcctgttagcggaatgattaccattgatcacaaaccaatcacagattattcgttaaaaacccttcgctccaatatcggggtcgtacttcaagaatccttcctgttttcatctacgattagatcaaatatttcgtatgggcggccggatgcctcaatggaagacgtcattgaagcggcaaaaagggcgcaggctcataactttattatggagcttcctgataggtatgacaccatgctgggagagaggggaatggggctttccggcggacagaaacagcgtattgccattgcgagagccatctgcttgaacccgagcattttaatattggatgatgccacaagcgcagtagatatgcaaacggagcacagcatacagcttgccttaaaagaagtcatgaaaaaccgcacaacctttatcgtcgctcaccgcatttcttcactgaaacacgctgatgaaattctcgtttttaataaaggacgcattcgtgaaaggggaacacatcatgagcttcttgaaaaaggcggctactataaaaagatttacgatttgcaataccgtgatgtcaaaatgattaatgagccgcatgaggtcggatagggaggggccaaatgaaacaagcgaaaaaacaggggattttagagcgtttctattactcttcagatgaaatcattgaaaagccgtttaactgggctcaaatgtggcggctgctgagctatgtcaaaccatatcgaaaaacaattttgccgctttcttttctcaccgtattaattggcactgctgtgaagcttgtgatccccattttgatcggcgtttatgttcttgatcaagcgattacaaggagaaactcggagctgctgattcagctcatttttattattagcggtttatatgtcctcaattacgccgccaatgtgttaagaattaggtggatgaatcagcttggccagcatgtcatttacgatttgcgacagcatttatttacccatgtgcagcgcttatcccatcgattttttgatcagcggtcggcgggatcgatcttagtcaggatcatgaatgatattaactctcttcaggagctctttacaagcggagtcatcaatttgttgaccgacttgctgcttctggccggcgtgattattattttgtttacgctgagccctgagctgactatagccatcatggtgacattgccgattatgttttttatttcaacaagtctcagaaaaaaaatacgccgatcctggcaaacggtacggctgaagcaatcgaagctcaactctcatctaaacgaaagcattcagggcatccgggtcacacaggcatttacgcaggaagaagaaaacatggcgtattttgacggtgtcaatcaggagaactacgaatcatggcgggaagcaactagaaaaaatgccatgttccgtccgcttgtagaaatgacgaatgcgattgggacggctgtcttgatttggtatggagccacactcatcatgaatgaaaccattacgattggcgtcttcgtttcttttgctttctatctgggaatgttttgggaacctatttcgagactgggtcaggtctataatcagctgttaatggggatggcatcatcagaacggatttttgagtttctggacgaacagccaaatgtcaaggagaagccgaatgccattcataatgaaaagataaatggggagatcagttttgaagaggttgaattttcgtatgatgaaaaacgaaaagccctttacgccgtttctttctctattccggcgggctcgacgcttgcgcttgtcgggcatacagggagcgggaagacgacgattgccaatttaatcagccgtttttatgatgcgaccggaggcaccattaaaatagacggtataccgattaaggatctttcccttgccagtctgcgctctcaaatcagcattgtcctgcaagatacatttattttctctgggaccatcatggaaaatattcgttttggaaggccaaatgcttcggatgaagaggtgatgaaagcgtcccaagcggtcggagcggatgagtttatttctgatttagcagaaggatacgcaacagaggtggaggaaagaggcagcgtactgtctgccggtcagcgtcagcttatttcctttgcaagagcattgctcgccgatccggctattatcatccttgacgaagcaacggcaagcattgatacagagacagaagtaaaaattcagcaagcgttaaaaacgcttctgaaagggcgtacagcagtgatgatcgctcacagattgtctacgatccgcgacgccgaccgcatcattgttcttgatcacggcaggaaaatagaagaagggaaccatgatcagctgctcgctaaaggaggcatttatgccgggcttgtgaaagcgcaatacagcacagcgatagaataatatgaaaagccttcaatattgaaggcttttggaaatttattagaaaaacatgaaactttttgatatccttcccgtactatttgttagatattctcaaggaggttttgaaatggaaacgaatgtagaaaaaaacagcggaacggcgactgaaaagccttcacttttaggagtaatcacaagtccgtccgttcaatttgaaagaataagagaaaggccggctgtatggggaccgcttttgattgttgcagcaattatcatcgtcggtgccgtgctgcaatcactcggtacggattatagtgagcttttgaaaagccaggatacgcaagggctatctgctgaacaaatggaaactgtcgcaacaataaccaaagttggcggaatggcaggcgctattatcggcggtatcgcagcattatttattgcccctcttatttattggctctgtgtaaaagtatcaggcggtgttacgacatataaaaaaatgctttctctcggtctgtttgtctctttgattagcagtctcggattattggttaatggaatcgttgcttttacgactgacgtgaatcctctttacagcacgacgtcactggcagggattatcccatctgacggggctcttgccagcgtgttaaatacctttgaaattttcagcatctggagctttgtattattagcaatcggacttcacaaaacgggaggcatctcaaaaaaagccgggtggatttcagcaatcattctattcggaattttagttgtattttcgcttttttcaggtttaatcaattctgtggcgggtgcataagctcatgaaaaaagtctggatcggaattggaatcgcagttatagtcgctctttttgttggaatcaatatataccggtctgccgctccgacaagcggcagcgccggcaaggagatacagacggggagcgttgaagaaaatgaaatctcatcaacggttatggttcctggcacgctaaaattttcaaatgaacagtatgtcttttatgaagcggataaagggacattagaagacattaaagtaaaggaaggcgataaagttaaaaagggcacggctttagtcacctatacaaatgagcagctgagcctggaaaaagaacagaaccagttaacgtctgaatccaaccggcttcaaattgaccaaattcaagaaaagttaaaagccttggacagcaaagaaagagaactggaaaaacaggtaggaaagaaagaagcagaaaaacaaatcgaatctgaacggacagagcttcaaatgcagaaaaaaacagcggagatcgaattaaaacaaaccgagcttcagcggcagtcacttgccaaccgggtgtcagatttagaagtgaaaagcgaaattgaaggcaccgttatttctgtcaaccaagaagcggcatccaaaaagtcagatattcaagagcctgtcatacatatcggcaacccaaaagaccttgtcgtctcagggaaattgtctgaatacgatacattgaaagtcaaaaaaggccagaaggtcacactcacttcagatgtaatacagggtaaaacatggaaaggcacggtttccgcagtcgggcttgttccggatcagcaggagagcgctgcggcacaaggaacagaacaggcggtccaatacccgcttcaagtgaaaataaaaggaaatcttccagaaggaaagccaggctttaaatttatcatgaatattgaaacagataaacggaaagcaaatacgcttccttcaaaggcagtcaaaaaagaagatgaccaatattatgtgtatacagtaaaagacggaaaagcaaagcgagttgatgtcaaaatcggcgaagtgacagatgacctgacagaaattaaagaggggcttacccaagatgatcaagtcattttgaatccatctgatcaggtgactgacggaatggaagtgaaatcctaaatgattcagctttctaatgtgcgaaaaagctaccagatcggaaaggaaacgtttgatgttctccattctattgatttggacattcatcaaggtgaatatgtctcgattatggggccgtcaggatcaggaaaatcgacgatcatgaatattatcggctgtcttgatcggccgacttccggtacatatcaattggacggcgaagacatttcttcatataaagataaagaactggcggcagtccgtaaccggtccatcggttttgtatttcagcaatttcagcttcttccgcggctgaacgcaaaaaaaaatgtcgagctgccgatgatttattccgggataggcaaaaaggaacgtcaagagcgggctgagagagcattggaaaaggtcgggttagccgatcgaatgctccacatgcccaacgagctgtcgggcgggcagaagcagcgggtggcgattgcgagggcgatcgtgaatgagccgaaattgattttagctgatgaaccgaccggcgcgctggatacgaaaacaagcgaggcgattatggatcagtttacagcattaaatgccgagggaacgacaatcgttctggttactcacgagcctgaagtagcagattgcacgaatcggatcgtcatggtgcgtgacggaaacattgttcctgccagctccggacaaaggagtgtgggagaatgagcctgttggaaaacatcagaatggctctaagctctgtccttgcccataaaatgcgttcgatcttaacgatgctcggcattatcattggtgtaggctctgtcattgttgtcgttgcggtaggacagggcggcgagcaaatgctgaagcagtcgatcagcggcccgggaaatactgcggagctgtactatatgcctagcgacgaggagcttgcaagcaacccgaatgccgcagctgaatctacgtttacagaaaacgatattaaaggtttaaaaggaatagaaggcattaaacaagtcgttgcttcgacttctgaaagtatgaaagcgcgttatcacgaagaagaaaccgatgctacggttaacggaataaatgatggatacatgaatgtcaattctttgaaaatcgaaagcggcagaacctttaccgacaatgactttctcgcggggaatagagtcggaatcatctctcaaaaaatggctaaagagctgtttgataaaacctcccctctaggtgaagttgtctggattaacggacagcccgttgaaattatcggcgtgctgaaaaaagtaacaggcttgctttctttcgatttaagtgaaatgtatgtgccatttaatatgatgaaatcctcttttggcacaagtgatttcagtaacgtatcattgcaggtcgaatcagcagacgacataaaatcggctggaaaagaagcggcacagctggtaaatgacaatcatggcacagaggattcgtatcaagtgatgaacatggaggagattgcggccggaattggcaaggtaacggcaattatgacgacgattatcggctcaattgcaggtatttcccttttggtcggcggaatcggtgtcatgaatatcatgctcgtatcagtcacagaacggacacgggaaattggaatcagaaaatccctcggtgcgacgaggggacagattctgactcagtttttaattgagtcagtcgtattgacgctgattggcggtctggtcgggattggtattggatacggaggggccgcgcttgtttcagccattgcgggctggccgtcactcatatcctggcaggttgtatgcgggggcgtgctgttcagtatgctcattggtgttattttcggcatgcttcctgcaaataaagctgcaaagcttgatcccattgaagcgctgcgttatgagtagcctcatgcaacatgcatgaggtttttttatgtttagtgatttctactatgaatataaaagacttttttcattaaaataagaagaaaatgtcgtacaattgtccttatttttgtcgaatttacagtttacaaaccctatagacatacgttaatatggagaaacgtgaaagattttgatagttattgaatgaatttgaatgattttagttgcctaaaccgaaaatagcgtttacaatgaaattgtattcaaaatgaatacgttttcattaggaggtgaagcatgctaactcctgaacggcatcaattgattattgatcaaatagaaaagcatgatgtggtaaagattcaagagcttataaatctgactaatgcttctgaatcaacaatcagaagagatttatcgacccttgaagaacgcggttttttaaagcgcgttcatggtggagcggccaagctttctgatatcagacttgaacccgatatgcttgaaaaatcatccaaaaaccttcacgataaattgaagattgctgaaaaagcagcttctcttttagaagaaggggattgcatttaccttgatgcaggcacgacgacattgcacatgattgattttatggataaaaccaaagatattgtcgttgtcacaaacggggtaatgcatatcgatgcattaataaggaaagaaatttctttttatctgcttggaggatacgtaaagcacagaacgggcgcgattattggaggcgcttcattgattgccatggaccagtacagatttgacaagagttttctggggacaaacggtgtccatacagaggctggatttacaacgccggaccctgatgaggcccttttaaaacagaaagcgatcaaacaggcaaaacacgcttacgtcttagcagacccttcgaagttcggagaaatttcattttcggcattcgccggaataggcgacgcaacaatcattacgactgacgctgaagagcttacattcgataattaccaagaaaaaactgtcgtaaaggtagtgaaaccatgatttacactgtaacacttaatccatctgtcgattatatagttcacgttgaagatttttctgtaggaggcctgaaccgttcttcgtatgataccaagtatccagggggcaaaggcatcaacgtatcgagactgctgaaaagacaccatgtggcgtctaaagcgctcggattcgtcggcggatttaccggagaatatatcaaaacatttttacgggaagaaaacctggaaacagctttttctgaagtaaaaggggatacccgtatcaatgtaaagctgaaaacgggtgatgaaactgaaattaacgggcagggaccgacaatttcggatgaagatttcaaagcctttttagaacagttccaatctttgcaagagggagatatcgttgttcttgcaggaagcattccatcttcactccctcacgatacttatgaaaaaatcgcagaggcctgcaaacagcagaacgcacgagttgttctggatatctcaggcgaggctcttttgaaagcaacagaaatgaaaccatttttgatgaagccaaatcatcatgagcttggagaaatgttcggcacggccattacatctgttgaggaagccgttccttatgggaaaaagcttgtagaacaaggcgctgaacatgtaatcgtatcaatggccggagacggagcgcttctgtttacgaacgaagctgtttattttgctaacgtgccaaaggggaaattggtaaactcagtcggagcaggggattccgttgttgcaggtttccttgccggaatttccaaacagctgccgcttgaagaagcattccgcttaggagttacttcaggcagtgctaccgcgttctctgaagaacttggaacagaagaatttgtccagcagcttcttcctgaagttaaggtcacacgtctatagaggaggaaacacaagtgaaaataactgagcttttaacgaagcatacgataaagcttaatattgagagcaaagaaaaagaaaatgttattgacgaaatggtcactgttcttgataaggcaggaaagttaaatgaccgacaagcctataaagaagccattttaaatcgcgaaagccaaagctccacgggtatcggtgaaggaatcgctatcccccatgcgaaaacggcaagcgttatcaacccggcgatcgcgttcggacgttcaaaagacggcgtcgattatgaatcattagacggccagccggctcacttagtgttcatgatcgcggcgactgaaggcgcaaacaacactcaccttgaagcattgtcaagactttcaacgctgttaatgcgtgaagaaatccgtaagcagctccttgaagctgagtctgaagatgccatcatcgacattattaatcagcacgataaagatgatgacgaagaggaagaggaagaagaagcggcaccagcacctgccggaaaagggaaaattttagcggttactgcatgcccgacaggtattgcccatacattcatggctgcggatgcccttaaagaaaaagcgaaagagcttggtgtggaaattaaggtcgaaacaaatgggtcaagcggcattaagcacaagctcactgcccaagaaatcgaagatgcacctgcaatcattgtcgcagcggacaagcaggttgaaatggaacgttttaaaggcaagcgcgtacttcaagttcctgtaacggcgggtatcagacgtccgcaagagcttatcgaaaaagcgatgaatcaagatgcgccgatttatcaaggcagcggcggcggttcagcagcttcaaacgatgatgaagaagcgaaaggcaagtctggaagcggtatcggaaacacgttttataagcacctgatgagcggtgtcagcaacatgcttccgttcgtagtcggcggcggtattctcgttgcgatttcattcttctggggaattcactctgctgatccgaatgatcctagctacaacacgtttgcagcagcattaaactttatcggcggcgacaatgcattaaaactgattgttgcagttctggccggtttcattgcgatgagtattgcagatcgtcctggttttgcgcctggtatggtcggcggatttatggctactcaagcgaatgctggattcttaggcggcttaattgccggattccttgccggttatgttgtgattttactgaaaaaagtatttacgtttatccctcagtcacttgatggattaaaacctgttttgatttacccgctgttcggtatttttatcactggcgtattaatgcaatttgtcgtcaatacacctgtagcggcatttatgaatttcttaacaaactggcttgaaagccttggtactggaaaccttgtgttaatgggtattatcttgggcggcatgatggcgatcgatatgggtggcccgcttaataaagcagcctttacgttcggtatcgccatgatcgatgcaggcaactatgcgcctcatgcagcaatcatggccggcggtatggttcctccgcttggtatcgcacttgcaacaaccattttcagaaacaaattcactcagcgtgaccgtgaagctggtattacatgctatttcatgggagctgctttcgtaacagagggagcgatcccatttgctgcggctgatccgcttcgcgtcataccagctgctgtagtcggtgcagctgttgccggcggattaactgaattcttccgagtaacgcttccggcgcctcatggaggagtattcgtagctttcattacaaaccatccgatgctttaccttttaagtatcgtgatcggtgctgtcgtgatggcaattatcctcggtatcgtcaaaaaacctgttacagaaaaataagaaaaaaagcgtccttggttcgaaaggacgctttttcttatccggccggcagggagcgcggttaagttatgtattttattcttttttatgataaagtaaaagaagagaaacaactgacatagcaattgtctaggaggaaacactttgaccgaggaaaaaaatacgaatactgagaaaacggcgaagaaaaaaaccaatacgtacctggaatggggtaaagcgattgtcatcgctgttctgctggctctcctgatccgtcactttttgtttgaaccgtatttagttgaaggttcatctatgtatcccacattacatgacggagaaaggctgtttgtgaataaaacagtcaactatatcggcgagctgaagcgcggagatatcgttattatcaacggtgaaacttctaaaatccattatgtaaaaagattgatcggaaagcctggagaaaccgttcaaatgaaggatgacacgctttatataaacggtaaaaaagtagccgagccttacttgtctaaaaacaagaaggaagcagaaaaacttggtgtcagtctgacaggagactttggaccggttaaggttccgaaaggcaaatactttgtcatgggagataaccggctgaattctatggacagccgaaacgggctgggactgatcgcggaagatcgaattgtcggcacatcgaagtttgtctttttcccgtttaacgaaatgcgtcaaacaaaataaaaacgccttgctggcctaggacagcaggcgtttttattttgaaaaagaagcgaccaatgcaatgcataaaaccgtgatgaacactgaaccgataatagctagcacactgaagaaaaggtgaacctgtttgttctcttttccgcgcttttctaaaagccgtttagaaaaaatgtgcgaaaatatgtaaataagggctatgcctatatataagccgatatctttggcggtaaagcctgttacggcaaggtaaaagcccgtaaaaaagatcagtaagcaatattcagtaagtgttaaaagcctcaacgtgttcctccatgagagtgtgtaattttccaggcggatgcattctctctctttaattgtaacacagctggctggtttgggtgtataagtgttttctctctgttttatcagggaatcatttctcttgccctgcattcatggtatacttttattgatgatagacatgatggaggataataaatgattgctgtaaataatgtaagcttgcggtttgcggatcgcaagttatttgaagatgttaatattaaatttaccccaggcaactgctatgggttaattggtgcaaacggtgccggtaaatcaacgtttctaaaggtgctgtcaggcgaaatcgagcctcagacaggcgacgtgcatatgagtcctggcgagcgtcttgccgtcttgaagcagaaccattttgagtacgaagagtatgaagtgctgaaagtggtcattatgggccacaaacgcctgtatgaagtcatgcaggagaaagacgctatttacatgaagcctgatttctcagatgaggatgggattcgtgctgctgagctagaaggtgaattcgcggaactgaacggttgggaagcggaaagtgaagctgcgatcctgttaaaaggccttggtatctcagaagatctgcacacaaaaaagatggcagacctcggcggttcggagaaggtaaaagttctcttggcacaggcattattcggcaagccggatgttctgctcctcgatgagccgacgaaccacttggaccttcaggcaatccagtggcttgaagagtttctgattaactttgaaaacacagttattgtcgtatcccatgaccgccacttcttaaataaagtatgtacgcacattgccgaccttgattttaacaaaattcaaatctatgtcggaaactatgatttctggtacgagtcaagccaactggcgttaaagctttctcaagaagcgaacaagaaaaaagaagagcagattaaacagcttcaagagtttgtcgctagattcagcgccaatgcgtctaaatctaagcaggctacatcaagaaagaaacttctcgaaaaaatcacgctggatgatattaaaccgtcttcccgccgctatccttatgttaacttcacgccggaacgggaaatcggaaatgatgttcttcgcgtggaaggcttaacaaaaacaatcgatggcgtaaaggtgcttgacaatgtcagctttattatgaatcgagaagataaaattgctttcactggccgaaacgaacttgctgttactacgctgtttaaaatcatttccggggaaatggaagctgacagcggaacgtttaaatggggtgttaccacatctcaagcgtattttccaaaagacaacagcgaatatttcgaaggcagtgatctggaccttgtagactggcttcgccaatattctccgcacgaccaaagtgagagctttttacgcggtttcttaggacgcatgctgttctctggagaagaagtccacaaaaaagcaaatgtactttctgggggagaaaaggtccgctgtatgctgtcgaaagcgatgctttctggcgccaatattttaattttggatgagccgactaaccatttagacctagagtccattacagcgctcaataacggcttaatcagctttaaaggcgctatgctgtttacttcccatgaccatcagtttgtgcagaccattgccaacagaattatagaaattacacctaacggcatcgtcgataagcaaatgagctatgacgagttccttgaaaatgctgatgtgcagaaaaaattgactgaactatacgccgaataaaaaagcagagatttttctctgctttttttgatacctaaatgtgaaaggagatcacaacatgaaatttttggttgtcggagcaggtggagtaggcgggtatattggcggacggctttcggagaaaggaaatgatgtgacatttctcgtgcgccaaaaacgagctgagcagcttaaagaaaccgggcttgtcatccatagtgaaaaagggaatgtatcatttcaacccaaactaatcagtgccggagaaacagggcaatttgatgtcgttatcattgcttctaaagcatactcgcttggtcaagtgttagaggatgtcaaaccacttatccatcaggaatctgtcattatccctttcttaaacgggtaccgccaatatgagcagctatttgcggcattttcaaaagaacaggtgctgggcggcctgtgttttatagaaagtgctttagacaacaaaggagaaattcatcatacgagcgcatcgcatcgttttgtatttggagaatggaacggcgagcgtacggagcggataagagcgcttgaagaggcattttcaggtgtgaaggctgaagtcatcattagcgggcatatcgagaaggacatttggaaaaagtatctctttattgcagcgcaagcggggatcacaacgttatttcaacgaccgcttggcccaatcctcgccacagaagccggacgtcacacggcccaaactcttattggggaaatttgcgctgttttacgaaaagaaggcgttccggctgatccggatcttgaggaagagagctttcgtacgatgaccaacatgtcttaccatatgaagtcctccatgcttcgggatatggaaaacggccaaacgactgaaggagaccacctgcatggatttttgcttgaaaaagcaaaacgtttatctctcgcagcaccagtattagaaaccgtttatgcgaatctgcaaatgtatgaagcagaaaaataaaaaaaggaggcggaaaagcctccttttatttacttaaaaagcccaatttccgtttctgaagataggctctcttttcccgtctgccgtaattccgtcaatattcatatccttagaaccgatcataaagtccacgtgtgtaatgctttcatttaggccttctttgacaagctcttcacgagacatctgctttccgccttcaatattaaaggcataggcgcttccgatcgccaaatgatttgacgcgttttcatcaaacagcgtgttatagaaaagaatgtttgattgtgatataggcgaatcgtaaggaacaagtgccacttcacctaaatagtgagaaccttcatctgtttccaccagttcttttaaaatatcctcacctttttcagctttaatgtcgactatacggccattttcaaacgtcagggtgaaattttcaataatatttccgccgtagcttaatggttttgtgcttgataccactccgtcaaccccgtctttttgcggcagcgtgaatacttcttctgtcggcatattggccataaactcatggccgctttcattcacgcttcccgcacctgcccaaacatgcttcctaggcagcttaattgttaaatcagttccttcagcttgataatgtaaggcagcgtaatgtctctcgttcaaatggtcaactttttcatgaagattttggtcatgattgatccacgcctgaaccgggttgtcttcatttacgcgtgtcgctttaaaaatttcttcccacagaaggtggatcgcttcctcctctgatttgccaggaaacaccttgtgagcccagcctgctgatgccgcacctacgacagtccagctgactttgtctgattgaatatattgtctgtatgtatgcaatgctttgcctgctgctttttggaatgccgcaatccgtttggaatctataccttttagcaagtctgggtttgacgacacaacagaaatgaaagcagctccatttttggcaagctcttctctgccttttgcttcccattcaggatattcttcaaatgctttaaacggcgcaagttcgtattttaatttggctacttcgtcatcctgccaattcacggtgacgttttttgcgcccttttcatatgcgtgttttacaattaaacggacaaaatcccgaacgtctgttgaagcatttacgactacatactggcctttttggacattaacgccgacttctaccgccagctgtgcatatgtatttaatttctgtgaaaatgaatccatgaatcattcctccaagcttttttctcatcatatcaaatatgatcctataaaggaaagaaggagcccaaagtgaaaaacccaaaacgacacgtcttgggtttttcaatattatggatgattcagttttacagtgccgcctgcaggcgaatggggcatatttgccaaagaaatgctcatgcctccaagaataattccgcttaaaatggctgcgatcgctactcttcttcctaaatctcttagcatctgtttcctccttaacgtttctccatttcccacaatatgaaggaagtgaggaaaaaagaagcaagaaatttgccgcgtgtgagaattttgcgggtaaagactatttaattgccttttgcagcttatcaatcacttctaaagaacggcctgtgccgattgctacagattcaagcgggttttgcgccacgtgtacaggcacgacaatctcttctgtgagccattctttaattccattaaggagcgcaccgccgcctgttaaaataacgccgcgatcaacaatatctccgctcaattcaggcggacagtcctcaagtgtcgctctgatggcttcaagaatatgcaggagggattcacgcattgcatcttgaatttcgttggattgaagcataatggtttttggaagacctgtcacgaggtcacgtccccgaatttccattgcctctggtatatgttcaatcagagcatggccaattttcatttttacctgctcagctgtgcgttcgccgatcagcaaattgtattttttacggacgaaagaaacgatatcctcatcaagctggtctccgccgatcctgatagaatggcaggaaacaacgccaccgaaggaaataatagcgacctctgtcgtccctccgccgatatctactaccacattggcaaccggctcatcaaccggtaaatccgctccgatggcggctgcaactggctcttcgattaaatgaacgtttttcgcgccgcaatttttcaccgcatcactgatggcgcggcgttctactgctgttgagcctgatggtgtgcaaacgactacgttcggttttctgaacgacatgccgatgctttttgcggcttttttcataatgtgctttagcaggtcagttgtcatatcatagtctgcgatcacgccatctttcatcggtctgacagcgacaatttttcccggtgttttaccgatcatgtttttcgcgtcagctccgattgcaagcactgcttttgtcgtcgtatcgactgcgacaacagatggttcatttaggataatccctttatttttgctgtaaacaagtatattagctgttcctaagtcaatcccgatttcagttgattgaaacatgttttcacccaatctctatcctaatttaatatgattctacatttaaagtttctcagaaatactgcgatttttgggggtgtgtgtcggtaaagaaatgtttttgtaaaaaatcaaggaactgtgtaatagaagtaatacatttttcggttttatggaaaaaatatcttgtaattcttatagaaagcgggaaactttttcaaagtttcattcgtctacgatatattgaggtacatccttaaaacattacatgagaaaagaaacatttaaaggaagaagggtttttatgaaatcaataggtgttgtgagaaaagtagatgaattaggccgcattgtcatgccgattgagttgagacgggcattggatattgccataaaagacagcattgagttttttgttgacggagataaaattatcttgaaaaagtacaaacctcatggcgtttgtttaatgactggagaaatcacttcagaaaataaagaatacggcaacggtaaaattacgctaagccctgagggtgcacagctgcttctcgaagaaattcaagccgctttaaaagaataaaattatgctaaaaaaggcggagcgatatcatctccgccttttttgcgtatcaatttttgattaccgccgcctaagataagacatcaagatatttggtaatgaatgatttgggatactttacatattttactcaattatttgtcgaagaatggtacaataagtagagaaacacaagcggcaggtggtcatatgagaaaatatcaagctcgtatcatttccatcattttggcaatgatttttataatgttttgggattatttattttattttataggcaaaaacccgattaattggcctgttgatattgtgtatactgcagtcacgctggtaagtgtctggatgttggcttattatattgatgagaaacagcagctggttaagaaaatgaaggataacgaatggaagtataaacagctttctgaagaaaaaaaccgcatcatggataatttgcaggaaatcgtatttcaaacgaatgcaaaaggtgaaattacatatttaaaccaagcgtgggcatctataaccgggttttcaatcagtgaatgtatgggaacaatgtataacgattacttcataaaagaaaagcacgtagccgaccacattaacacccaaatccaaaacaaagcgtcttctggcatgtttacggcaaaatacgtgacaaaaaacggcacgattttttggggagaagttcattataaactttactatgaccgggatgaccaatttacaggcagcctgggtacaatgtcagatatcactgagcggaaagaggctgaagatgagctcattgagattaatgaacggctggcgagggaatcccagaaactatcaatcacaagtgaacttgccgcaggtattgctcatgaggtcagaaaccctttaacatctgtcagcggtttcctccagattatgaaaacacaatatccggacagaaaagactattttgacatcatcttttcagagattaaaagaatcgatttagtgctcagcgagctgctgctgcttgcaaaaccgcaggcaatcacatttaaaacacaccagcttaatgagatcttgaaacaagtcacgacattgcttgataccaatgcaattctgtccaatatcgtcatagagaaaaatttcaaagagacagatggctgtatgattaatggagacgaaaatcagctgaagcaggtctttatcaacatcattaaaaacggaattgaggcaatgccaaagggcggtgtcgtcaccatttcaactgctaaaacctcctctcatgcagtgataagcgtaaaggatgaaggaaacggcatgccgcaggaaaagctgaagcagattggcaaacctttttattcaacaaaagaaaagggcactggactgggacttcccatttgtttgagaatcctgaaggaacatgacggggaattgaaaatcgaaagtgaagctggaaaaggcagcgtctttcaagtggttttgcctttaaaatcagacagctgagaggagaaaaataaagtgaactcgcttctgtttgtatatgggacattaagaaagcatgaaaaaaaccatcatttgctggcacaatcggcatgtatcaatgagcaggcgagaacaaagggaagtttgtttgctgcaaaagaggggcccacagttgttttcaatgatgaagatgaaggctatatatatggcgaagtatatgaagcagatgaattgtgtatacataagctcgatcaattttttcaaggatatcataaacaaacggtgtttgtagaaacggatgtcgggattaaaattgcgcttatttattttatgaacaaagacgggtgtgccggttttacgaaaataagcagcggcgactggaaagaacatcagatgatcagcaaatcgaaaaatcccatttattattttgcctatggatcatgcatggataatgcccgctttcaaaaagcgggagtcgatcactattttcaagatccagtaggaagagctgttttaaaaggatacacaacccgcttcacgctaaaaagggaagacggttcaagagcggacatgttggaagacggaggaacaacagaaggcgttttataccgtatcccttattctgctctctcctatctatataaaagggagggcgtcgaatctcttacgtatcggccggcatttgtagacgttgaagctggcggaaggcactacaaagactgtttaacctttctcgtcctccaaaaagaagcggaaattgccccgcctcagcactatcagattgaaatcgaacgcggagcggagctgtatttgtcgcctgagtttactgaaaagctcaagcggcatatgaattcgctgccaaaaggataacactgtaacaaaagaatatgataaaatttgatcaatatcatgtcatataaaggagcactacgatgaaaaaagaatttgcggtaattgggctgggccgttttggtggcagtatttgcaaagcattaagcgaagaaggcgtcgaggttatggcaatggatatcgatgaagataaagtcaacgagtatgccaagattgcatctcacgcagttatcggtgattcgacagacgaatctgtcctgaaaaatttaggcctgcgaaattttgaccacgttattgtagcaatcggggaaaatattcaagcgagtattttaacgacactcattctgaaagaacttggcgtccatacgattacagttaaagcgcagaacgattatcacgaaaaagtgctgtctaaaattggtgcggatcacatcgtccacccggaacgcgatatggcaaaacgaattgcgcataatatcgtgtccaacaatgtacttgactatttggagctgtctgaagagcatagtcttgttgaaatcgtagctaacagccgcctggctggaaatacacttctcgatttagatattcgcgcaaaatacggtattaatatcgtagccataaaaaggggcaaggaagttatcgtatcaccgcttgcaaccgaagtcatccaccaagaagatatactcattgttattggatcagttacagacatctcccgtttcgaaaaaagagttcttcatacaaaatagcagccaaataagccgtcctcaaagggcggtttttcatattatcagaatataacaactttaatgaactgagcgtcaatttcttaaaatttcattgactaagcacaggcgttccgatagcatattgtaccatataataaaaaagaggaggggcctatttgaataaagaagcgctagtcaataggctgaatgcttcagccaaaagacaaaaagctgatatcgtcattaggaacggaaaaatcatggacgtttataatcaagaatggatatatgaagatattgcgattacagatggagttattgtaggcctcggtgagtatgaaggtgaaaataccattgatgcagagggacaaatgattgttccgggttttattgatggacatgtacatattgagtcgtcaatggttacaccgattgagttcgctaaagcagtgttgcctcatggtgtgacgacggttgttacagatccgcatgagatcgcgaatgtgtctggtgaaaaagggattgtgtttatgcttgaacaagctcggcatacaccgctgaatatccattttatgcttccttccagtgtgcctgccgcaagttttgagcgatcaggcgcaattctcaaagctgccgatctcaagcctttttatgaagaagaagaagtattagggctggctgaagttatggattatgtgtcggttcagcaggctgaagaagacatggttcagaaactgctcgatgcccgtgtggcaggaaaacggatagacggtcatttagctggtttatcaacagacctcattaacatttacagaaccgcctttgtcttaaacgaccatgaagtaacatcgaaggaagaagcccttgatcgtatcagaagaggcatgtatgtcatgatgcgtgaaggatcagtcgccaaaaacacgctcaatgtgctgccggcggtgaatgaaaagaacgcacgccggttctttttctgtacggatgataagcatgtggatgatttattgtcagagggaagtgtaaaccatcaggtgaaaatggcgattcaagctggacttgatccgtttttagcctatcaattaggaagcctcaatgcggccgaatgctacggattagatacaaagggagcgattgccccgggttttgacgctgatttgctctttgtatctgatctggaaaatgtcactgtcacaatgacgatggtaaaagggcagactgttgctgaagacagcaaagcggtttatcaggatcatgcttcaactgcagcaccagatcaggcactgcttgattctgttaagcttgctgctcctcttaacaaacaggattttcatatgccaatcgattcagaggagcagatcaatgtcattcaaatcataccaaatcagcttgaaacacgattagtacaagttccggctcctgatgcccgcgaatttgagcctgacactgagtttgatttgttaaagattgcagttgtcgagcggcataaaggattaaaagaaaccggacttggtattgtgaaaggttttggattcaagagcggagcgattgccacaaccatttcacacgactcccataatattattgctgtcggaacgaatgatgaggatatcgcggcggcagttaataagctgcaggaaattggcggaggattaacgattataaaaaatggggaagagctccattcagtaccgctgccgattgcagggttattatccgaccaatctgcagagcaagtgaatcaaagcttgctgacgcttcatgataaattgccgttaatcggtttcacaggcggatttaatccatttttgacattgtcgtttttagcgttgcctgtcattcctgatattaaaatgacgactacgggattattcgatgtaaaatcatttcaacacatatcactgcaataaaaagaggcactccctaagggagtgcctctttttttaaacctccataatgatcggcaggatcattggacggcgctttgttttttcgtacaagaaaggtgcaagcgtgtctgtaatctcatttttgatttcagaccattgagtcgtttttcgttccattactttttgtaagtgatttgaaatgagctcttgagcgtcgttgatcaagtcgccagattctctcatgtacacaaatcctctggaaatcaaatctggacccgctgaaatcttgaagtcgtccatgtcaatgctgacaacaacgatgacaagtccttcttcagagagaattctgcgatcacgaagtacgatattgccaatatcaccgataccgcttccgtcaatgtacactgaaccggacgggatttttcctgcaactgaagcctcatcgcctttaagcgctaatacttcaccattatccatgataaagcagttttcctctgggatgccacaatctgttgcaagcttgacatgcatcttttgcattctgtactcaccgtgaatcggcatgaagaatttaggcttgattaaacgaagcatcagcttctgttcttcctgtccgccgtgaccggatgtatggatatcgttaagagggccgtgaataacctcagcacccgcacgatacagctggttgattgttcgactcacgctgattgtgttgcctgggataggggatgaagaaaatacgaccgtatccccaggattgattgaaatttggcggtgtgtgccgtttgcaattcttgataacgccgccattggttccccttggcttcctgtacataaaattgttactttattagcaggcatacgattgatttcgttatgctcaataaacgtatttttaggacagttaatataaccgagtgtctgtccaatttcgatagccgattccatactgcgtccaaatacggcaacttttcttccattttgtacagcagcttcaattacctgctgcaagcggtgaatattcgacgcaaatgtagcgaagataattcggccgtccaccttgcggaaaatgtcatgaatgctttctcctacacgacgctcagacatggtaaactccggattttcactgtttgtgctgtctgaaagaaggcacaaaacgccttctttaccgatttcggccattttcgttaagtttgccggctcgccgactggagtaaagtcgaatttgaaatccccagtatgtacaatgtttccgggcggcgtttttacaacaatgccgtaggaatccggaatactgtgtgttgttctgaagaatgacacagccgttttgcggaactttacaatatcatcctcgccgataatgttcagtttcgtctgtctcaataatccatgctcttcaagtttattccgaagtaagccgatcgcgagttttccgccgtatacaggaatattcacttgtctgagcaggtatggaataccgccgatgtggtcttcgtgcccgtgggtgataaaaagccctttaattttatcttcgtttttgactaaatacgtataatcagggatgacgtagtcaattccgagcagttcgtcctcgggaaacttgatccccgcatcaatcagtacaatttcatcctggaattgcaccgcgtacgtatttttaccgatttcgcccaaacctccgagggcgaaaacagcagtctgatcattttttacaaatttcataccgctcataactccaatactttaaaattttcgctctgttgttcatattctaagaatgcaccatcaacaggtgtaataaactcaatattaaatttcttttctttcagctttgttctgacgtcacgctcagatacgccttcaatataaagtgaatctgtcttttcccgaacaggtacttcgtcagccttctcttgataaaataccttataaatcattccaaatctctccttaaatgccgtatgttagactcgctcattctattatattcgaaaacggaatataaggaaagccttgagcaaaataaggatctctcaaatagtgaaagatcccttgtcaggcaattgctttcttacggagcattccgttccattgtcttctgagtttctttcttaatttacgcagcattagccagtccctcctttaatgaaaaatttgtcccagagttcttttatacaaatagtatacggagattgaggaagacttttcgtggttattaatggaatttaatatgatttttgaacgaaattgtttgctgaatgacaatctttttgtatgatgagggtgggaattgcagaccaagacgataaaggggaagttgcgatggattctaaattaatcttttttgatattgacggcacaatatatgatcatgataagaatataccggaaagtacgagaaaaaccgtggcggagcttcagcgccaagggcatcatgtgtttattgccagcggccggtctccatttttggttaagccgattttggaggagctgggcatccactcatttatttcctacaatggacagtttgttgtctttgaaaatcaagtgatttataaaaatccgctgcctgaaaatgcaatcaggcgattattaaagcaggcggatgaaggcaagcatcctgttgtgtttatggctgaggacacgatgaaagcgactgttgcggatcacccccatgttctcgagggaatcggcagccttaaaacagattatccagagaccgatgaccttttttatgaaggaaaagaaatttttcagcttcttttattttgtcaggatgaagaagaaaaagcttatgccgcttttcctgagtttgatctagttcgctggcatgagctatcgactgatgttctgccgcacggaggttcgaaggcagaaggaatcaaaaaagtgattgagcgtcttccgtttgatatcggcgatacatatgctttcggcgacggattaaatgatttgcaaatgattgaatacgttgggacaggcgttgctatgggaaatgctgttcccgaactgaaagaaatcgcggactttgtaacaaaaccggtggacgaggatggaattgcatacgctgtcaaagaattgggccttttaaaataaagaaacggctggcattgtgccagccgttttctcttttagcgctcaattgcgattgcattttcaggttctttgaaaggattttccttatcaatatgatcatagaacataacgccgttcaaatgatcgatctcatgctgaaacacaatagccggaaatccttttaaacgaatatcaatattttcgccttctagtgttgttccttttactctgatgcgagcatagcggggaacataaccgggaatcgcttcatccacagagaggcagccctcgccgcttgttaagtagcttttttcaactgaatggctgacgatcttaggattaaacagagcatagctgtataatttaccggaagcatcttccgcatgaacggcgatcattcgttttttgatattaatttgaggagctgcgagtcctacgccagggcgcagcttgtatttttcggctaattctggattttggctgtttttaacaaattcgatcatgtcggccagctgctgtttttctgcatcagttggaggcagctcaacaggttcggcagtctctctgagggctggatggccgtcacgtacgatgttttccatagtaatcaagaaacttcactcctaaagcttaatatgtaaattatatcggatttcttcacaaaggtgcaacgaaacgaatgaccagccgtatatggctggtcaatttcatgctgtgtggttagcaacagcctccacctaaataagcagctccgacaatgattaacagaatgaataaaacaacgattagcgcaaaggtgcggccgtagccatatccgcagccaccatatccgtaaccaccataactgcagcagcctccgccgtaaccatatccatacatattacataacctcctcttttaattacgccagagcctttataagtaggcatagcgtctaatataacctatgtaaaaacaaaaaagttgtatggtcatctgtcctgatttttcacttttttgatttaatttcagtattgcatttatacagcacggctattgccaaatgtccccatggattctatagtagaaattgtcaagattgggggatttaacgtgaaagacgctataaaacggcggcctggaatgaagatcggagctttttgtgccatggcactgatattaacaggatgcatgggacaggacccggttgattcagttcatcattcattagaaaaagccgcggaatcggaaaagccgtttcaagaagaacaaaacacactcaaagaattagaggccaaagaaaatcagctttacgatagtgttatgaagctcaatatggatgattataaaaaaattgttgctttatctaataaggcgcttgaaaatgtcagcaaacgcgaagaacacctagagcttgaaaatgacagcatgaaaaaatcggaaacagaatttgaggaagcaaaaacgtcagcggaacatattaaggaaaaagacataaaagaaaaggccgatgccgcagcaaaccatatggagaaaagatatacatcatatggcactatgtataaagagtataaaaaagcgcttgagcttaataaaaaactgtatatgcagctgaaagacaaagatttgacaagagatgatctggatcagcagatcgataaagtcaatgcttcttatgaaaagatccttaaatatagcggagaatttaatgaacaaaccgaaaaatataataaagcccgggaagatttatatgatgctgcaggctatcgtgtgaaaaagagctgactcgatcagctctttttttgaatgaaatgcgattcggatttcgttcaaaattttcatttctattgtagtacagcatagtaaggtatactagtacagttttgggtgcggttggcatctgtttttttgatgaaaatgtaaagcgaatacatttattgaaaatcagcgatgaaaacgattgacggttcttctttatttggtgtaaactaatccatgttaagcggtgttgtattagttttttacaacttcgaaataatacagttcaaagcagagtgtaactatcctacataaaaggttttggcaaactggggatcggctaaaatataatacgacttactgctgatactttagggtaccctaagtttgtatgtataaaaggaatgcacgtctaatgactgtttaaaagaaaggaagaggtgacttagtatggctgcaaaaacgaaaaaagctatcgttgacagtaagaagcaatttgatgccattaaaaagcagttcgaaacgttccaaattttaaatgaaaagggagaagtcgtgaatgaagcggcgatgcctgatttaactgatgatcaattaaaagagctaatgcgccgcatggtatttacgcgtgtgcttgaccaacgctctatctcattaaaccgtcaaggacgtctcggattttacgctcctactgcgggtcaagaagcttctcagattgcaacgcatttcgcgcttgaaaaagaagactttgttcttcctggataccgtgatgtgcctcagttaatttggcacggccttccattatatcaagcgtttcttttctctcgcggacatttcagaggaaaccaaatgcctgatgatgtgaatgccctttctccacaaatcattatcggtgctcaatacattcaaacggccggtgttgcgctaggtcttaaaaaacgcggtaagaaagctgtcgcaatcacttacactggtgacggcggagcttctcaaggggacttctacgaaggaattaactttgccggagcttataaagcacctgcaatcttcgtggtacaaaacaaccgttacgcgatttcaactcctgttgaaaaacaatctgcagctgaaacaattgcacaaaaagctgtagctgccggtattgtcggcgtacaagtagacggaatggatccgcttgctgtatacgcagcaactgctgaagcacgcgagcgcgcaatcaacggcgaaggtccaacactaattgaaacacttacattccgttatggcccgcacacaatggctggtgacgatcctactaaatatcgtacaaaagaaatcgaaaatgagtgggaacaaaaagatccgcttgtacgcttccgtgcgttccttgaaaacaaaggcttatggtctgaagaagaagaagcaaaagtaattgaggatgcgaaagaagaaattaagcaagcgatcaaaaaagctgatgctgaaccgaagcaaaaagtaactgatttaatgaaaatcatgtacgaaaaaatgcctcacaaccttgaggagcaatttgaaatttatacacagaaggagtcgaagtaagccatggcgcaaatgacaatgattcaagcaatcacggatgcgttacgcacagaactgaaaaatgacgaaaatgtcttagttttcggagaagacgttggtgtaaacggcggcgtattccgtgcgacagaaggattgcaaaaagaattcggtgaagaccgtgtgtttgacacgccacttgctgaatctggtatcggcggtcttgcccttggtttaggcttaaacggcttccgtccggtaatggaaatccaattcttcggatttgtttatgaagtaatggattcagtttctggccaaatggctcgtatgcgctaccgttctggcggacgctggacttcacctgtaacaattcgttctccattcggcggcggtgttcatactcctgaacttcacgctgacagcttggaaggtcttgttgcacaacagcctggtatcaaagttgtgattccatcaactccttacgatgccaaaggacttttaatttctgcgatcagagacaatgatcctgttgtcttcttagagcatatgaagctttaccgttctttccgtcaggaagttcctgaagaagaatacacaattgagcttggaaaagctgacgtgaaacgtgaaggtactgatctttcaatcattacttacggcgcaatggttcatgaatcgttaaaagctgctgaggagcttgaaaaagacggcatttctgctgaagttgtcgaccttcgtacagtaagcccacttgatatcgatacaattatcgcttctgtagaaaaaacaggacgcgcgattgtcgttcaagaggcacaaaaacaagccggtattgctgcaaacgtagtagcagaaattaatgaccgtgcgatcctgagcttggaagcacctgtacttcgcgttgcagcgccagatacagtatttcctttctctcaagcggagagcgtatggcttccaaaccataaagacgttcttgaaacagcaagaaaagtgcttgaattttaatcaaactgcataatcgagagggaagatgaacgttttccctctattatatatctgttttcaatgcttacgatgtaaactttaaaattgcttaatcaaactaggaggtcgagaactgtggcatttgaatttaaacttccagatatcggggaaggtatccacgaaggcgaaatcgtaaaatggtttgtcaagcctaacgacgaggtagacgaagatgatgtactggctgaagtccaaaatgataaagcagtagtagaaattccttcacctgttaaaggaaaagtattagaattaaaagttgaagagggaacggttgcaactgttggacaaacgattattacgtttgatgcacctggttacgaagatcttcaatttaaaggcagcgacgagtctgacgatgcgaaaactgaagcacaagttcagtcaactgcagaagctggacaagacgttgcgaaagaagagcaagctcaagagcctgcaaaagctactggcgcaggacagcaggatcaagctgaagttgacccgaacaaacgcgtgatcgctatgccttccgtacgtaaatatgctcgtgaaaaaggcgtagacatccgtaaggttactggttcaggcaacaacggacgtgttgtaaaagaagatatcgacagctttgtaaacggaggagcgcaagaagctgcaccgcaagaaacagctgcaccacaagaaacagctgctaaaccggctgctgcaccagctccagagggcgaattcccagaaacacgcgaaaaaatgagcggtatccgtaaagcaattgcaaaagcgatggttaactctaaacacactgctcctcacgtaacgttaatggacgaagtggacgtaacaaaccttgttgcacatcgtaaacagttcaaacaggttgctgctgatcaaggaatcaagctgacttacttgccttacgttgtaaaagctcttacatctgcactgaaaaaattccctgttttaaacacgtccattgacgataaaacagatgaagtcatccaaaaacattacttcaacatcggtatcgctgctgacactgaaaaaggcttgcttgtaccggttgtgaaaaatgcagatcgtaaatctgtctttgaaatttctgatgagatcaatggccttgcaacaaaagctcgtgaaggcaagcttgctccagctgaaatgaaaggcgcatcttgcacaattacaaacatcggttctgccggcggacaatggttcactccggttatcaaccatccagaagttgcgattcttggtatcggacgcattgcagaaaaagcgattgttcgtgatggcgaaatcgtagcagctccagtcttagctctctctctcagcttcgaccaccgtatgatcgacggagcaactgcgcaaaatgcattaaatcacatcaagcgtttactgaacgatccacaattaattttaatggaggcgtaatgttatggtagtaggagatttccctattgaaacagatactcttgtaattggtgcgggacctggcggctatgtagctgccatccgcgctgcacagcttggacaaaaagtaacagtcgttgaaaaagcaactcttggaggcgtttgtctgaacgttggatgtatcccttcaaaagcgctgatcaatgcaggtcaccgttatgagaatgcaaaacattctgatgacatgggaatcactgctgagaatgtaacagttgatttcacaaaagttcaagaatggaaagcttctgttgtcaacaagcttactggcggtgtagcaggtcttcttaaaggcaacaaagtagatgttgtaaaaggtgaagcttactttgtagacagcaattcagttcgtgttatggatgagaactctgctcaaacatacacgttcaaaaacgcaatcattgctactggatctcgtcctatcgaattgccaaacttcaaatatagtgagcgtgtcctgaattcaactggcgctttggctcttaaagaaattcctaaaaagctcgttgttatcggcggcggatacatcggaactgaacttggaactgcgtatgctaacttcggtactgaacttgttattcttgaaggcggagatgaaattcttcctggcttcgaaaaacaaatgagttctctcgttacacgcagactgaagaaaaaaggcaacgttgaaatccatacaaacgcgatggctaaaggcgttgaagaaagaccagacggcgtaacagttactttcgaagtaaaaggcgaagaaaaaacggttgatgctgattacgtattgattacagtaggacgccgtccaaacactgatgagcttggtcttgagcaagtcggtatcgaaatgacggaccgcggtatcgtgaaaactgacaaacagtgccgcacaaacgtacctaacatttatgcaatcggtgatatcattgaaggaccgccgcttgctcataaagcatcttacgaaggtaaaatcgcagcagaagctatcgcaggagagcctgcagaaatcgattaccttggtattcctgcggttgttttctctgagcctgaacttgcatcagttggttacactgaagcacaggcgaaagaagaaggtcttgacattgttgctgctaaattcccatttgccgcaaacggccgcgcgctttctcttaacgaaacagacggcttcatgaagctgatcactcgtaaagaggacggtcttgtgatcggtgcacaaatcgccggagcaagtgcttctgatatgatttctgaattaagcttagcgattgaaggcggcatgactgctgaagatatcgcgatgacaattcacgctcacccaacattgggtgaaatcacaatggaagctgctgaagtggcaatcggaagtccgattcacatcgtaaaataattttcatatcaaaaacagccctcgctcaaagcggggctgtttttttattttgacagcacatgctgtaatggtttaatgatgtcttctttctttttcacacatccctcgattttcaccacgacatggcgctgatcaacaaccataagggtagggacagtttcaatctcatcttcccagccttcttttttatcatagaccttcattttatctatttgctcgggataatctttttctaaatcaagcagtgcatcgtaataaggcgcttcctggtctatttggttctcatcagaaaaaaacaggatttgtgtatgatgaatgttgtcaatccggctttttttcatcggattgatggtggaaagcgtacagcccgataaagcaaatactattatcagcatggggaataccgcgcgatatcgcatctatcttctcctctgtataaacagtagttaactagctttagtttatcacgagaggcggcttaatctgcttcttgttacctaattgttatataattgaaaccgtttttaaagtgagattacatattatatcaatcgtttaaaatagcaacctggggtatattgaattttttgctgcattcttggatgaaagttcaagaaaacgtgaaattacattatgtgctgtggcatatatatcgagtaaagcttctgtatgaagaagatattgtatgagggaaaatggaaaagcacggtctatatgatgatctaaaattaaatgtgttatacagtttattgttgacattttaaatgtgacatattaatataataacaacaaaagaaattaagcgttttcaaatttcaaagaaatggggaataagagatgggtacgattgtttgccaagattgcaacgaagccattcattactttgaagatgagaaagtgacaacattatacggaacatgctgcggacaatgtcaatgtcctgttgatgaagagtaaaaaaaagcatgcggctttaagccgcatgctttttattttttattgaattgctttttgttctttgatgacccggatcatatgtaaagtcgagtcctcaggtccttgaacagggaggcctgcgtcaaggtttttaaaaatgtagctgatgttttcttctgtaataatttctcctggaatgaagattggaataccaggcggatataccatgacaaattcagcaataatccgtccggatgcttcttttaatgggatgacttccgtatttgcataaaaagcatcacgcggagtcattgccaataaaggtatttctggaagcagaacctcagtttgctgatgtgttacatcttgttctgacatttgctgtgcgatctcagttaaagcctctacaagccggtctgcatcattttggctgtcaccaggagtgaaaatacacaaaatattgtacagatcagaaagctcaacctcaatattaaaggattcacgaagccatttttccacgtcatgtcctgtcaggccaagacttttcacagagataatcaattttgtcggatcatagctgtaagctgctttcgaaccaagaatctcagaaccgacacaataaatgccttcaatctggttgaggcgatctctcgtctgattggcaagcttgagtgtttcctcagcaagctggtggccttctgttgcaaggcgttttctggcaacatccaaagaagcgagaagcaagtaagaagttgacgtagttgtcagcatgctcaggatggattgcactctgtcttttgatacaaggccctctctcatgtttaaaatcgaactttgcgtcagtgatccgcccagcttgtgtacacttgtcgctgctatgtccgctcctgcctgcatagccgatagcggcaattcgtcgtgaaaatgaatgtgaacgccgtgtgcttcatccacaagcactggcacatcaaacgaatgagcgagttctacgatgctttttaagtcggctgcaacaccgaaatatgtcgggttgatgacgagaagcccttttgcatccgggtgctcggtaagcgcccgtttagcagattcaagtgtaattccgtgggagatgcccaattcattgtcaatttcaggatgaataaaaattggaaccgctccggaaaatacaatagctgtcataattgatttatgaacatttcttggaataataattttatcaccaggtccgcaaacagccattaccattgtcataatggcgccgcttgttccttgaacagaaaaaaatgtatgatccgctccaaatgcttcagcagccaggtcttgtgcttgtttaataatgccttttggcgcgtgcagatcgtctaatggttcaatattaatcaaatctatgcttaacgcgttttcaccgataaattgtctgaattctgggtccattcctgccccttttttatggccgggaatatggaattgaacaggctgtctgcttgcatgctttttcagtcctgtgtataagggtgtttcatgttgcgacaattgttttcccacctttgtaatcatacctatgcataatagtgtgtattaaaatcagtttctcaaccgttttttagacgtaaaacaaatgaattatattatgaacttgaaagaatgtaaagaacaatttatgatcaaatgaagatgctttctcttaagggaagtaaatctacaaggagtgaagaaaatggagtatcaatatccgatgaatgaagattggacaaccgaagaagcagtggatgtgattgcatttttccagcaggttgagcttgcatatgaaaaaggggcggatcgtgaagaactgcttaaagcttaccgccgtttcaaggaaattgtaccggggaaggccgaggaaaaaaagctatgcggcgagtttgaggaacaaagtacatattctccttatcgcacggtcaaacaggcgagagaatctgatcaggcgaagattaagatgtaggaaaaagagctgggggatatcccggctcttttttatgcttgtgatactttttgggtgagacggtacagaaaagcaagctgcttaaaggcatcgtcgatacgctgaaggaattcctggttattcatattcagcacttcttctttttggagctggatgccgcataacagctcggctttctttacagtctgcaaacgctcaaacagtgtcttcagctgttccttgtccatttcagactgtttatgtactcccggttttgtgtgatctgcagaccaaacgaagctgtcagggatatttttcgtaatggtttcttggttcatttcaagcaatttgccgtattcttctttgataggggattcataaataatcgcaaaccacacaaagacgtggctttcccataaaccaatttggaaatgcggcagttttttatagcctcttttgctgtttgcgaacgccacccagctgtcagccgggggattgacggatcttcttgcgtgctttgccacatgcgcaaacatttcatctccggttaaagctgataaagttggggcaaaatgttcgcctagagctgtaagcttcggacggaccgtctcttttaatacttccatgcgcgcgtctaagccttctattgtaaaagtgttaaagtcctcttcagtgaaacgcatttgtgtcatgattttcctccttcatgctaagtatacatattttatcacagttcatacgagcttcaaaaagattgagtgcgtttgaagtaaggggaaatgtggtaataaacgaataggtaaacacacaattttcagaatcatgttgcgcgtaaatagaacaatcatacgatataagaagtaatcattgttgaatggcaaaatgggatgcttttttacaaacaaatgatctctggaaggggcgaaagacaatgaggcaagttgtaaaagagggatttaaggaagagaaaaacaatcgtgttgctgtctggagactagaggttgattatgaattggcaaccctatatgaagcaatgcagaaagaaaatgaagagcagattgaacaaagcaaaaacaaacttgagcgacttagaaaagaatggattcgtcttaacgggtaaaaaagcgatagtgaaaacgaaccgcatgaatggttcgtttttacgtgagaagggatatttttcattttccttgctttttcattgccgttatcagtatcctataaaataaaaggtctacatagaagagaggtacgaacgaatgacaaattggacggaaattgatgagattgcaaagaagtggataagagaagcaggcgcgagaattacacaatccatgcatgaaagcctaacaattgaaacgaaatcaaatccgaatgatttagtcaccaatattgacaaagaaaccgaaaagtttttcattaatcgaattcaagaaacttttccgggacatcggatactcggtgaagaggggcaaggagacaaaatccactcacttgagggagtcgtatggattattgatccgattgatgggacgatgaattttgtgcaccagcaaagaaattttgcgatttccattgggatttttgaaaacggtgaagggaaaatcggtttaatttatgatgtggtgcacgatgagttgtatcacgcatttagcggcagaggagcttatatgaatgaaacgaagctggctccattaaaagaaaccgtcattgaagaagcgatacttgccattaatgcaacatgggtaacggaaaacagaagaattgatcaaagtgtgttagcgccactcgtgaaaagagtcagaggcacacgctcctacggttctgccgctttagagctggcaaatgtcgcggcaggaagaatagatgcttacatcacgatgcggcttgcgccatgggactacgcagccggctgtgtgctgctaaatgaagtaggaggcacctatacgaccattgaaggagagccgtttacctttttagaaaaccacagtgtgctagccggaaacccatctatacataaaacgatatttgaagagtatcttcatgctcggaagtaggccatttgagcaggatgatctcagcttgttagaaaagctcgcagaggctcaacctgtatggaaagaggaggagtttggagataaagatgcagaagactatatcatttcctactccatgtacaacggttcatggcttgtatgggaaaaagacggtatgcctgttgccgtcagctaccatctcgagtggtctccttcaaacggtaagccgtggctcggaacggtcctgattgacccggctgaagaaaaaaagggacatgcgaagatgatcattgaacagatcagcaaattgcttagagccaaacacaaagcgatgtttgcgggagttcccattgagcgcagtgaatggatactgtttttaagccaatgcggctttgaacagctgaaaacggaaaaagatgagaaaggcaaatcatttatgatcttggtgaagcctttagcagaagctgccgtatgataacgacagcttatttgctgcatgcgggttcaataaaaagcctctcaaacattgagaggcttctgatgatttgaaaattatttttttactgcatgaatataatgaatcgtttcaaacgctgacaaattgtcttttcgattactaaagaaaaggtcattgatgtcgtctggtgatagatgttcatagatcagtaaaccagatgactctaacagatgttcaatctcttgataagtgaaacatgatttcatcggttccccgcttgcggcagccatcttcaccatatgttcaactcgatttgacgtcccttttgctgtaaaaagtgtttcgtccgcataatcaaaaacaatagagcttccaggcgggacataagaaaataaattgctgatcaagcttgcattttcttcccgtgttacataataagacactccgagaaggctgaagaatgtttttgtgttcttaaatccttcatctaagagaggatcatacgaaaacgttttggtgaaatccataggaacaaaatgaagatgacccggaattgtcagatttgcatccttcagcttattttttttgaattgctgtgtagccggatggtcaacctcgaaaacctgtaagctgttttctaattctggatgccgaaagcagaaggtatccagccccgctccaagaatgacatactgttttgcccccaggattaattcgttgtgcaagactttttcacaataagaagcacgtgctagtggcgtgggagacagctggatttgtgcaacccattttaatattttttcaggatcattttgaagacgttcggcgatctctttgttgaaaaacgatattccttgaatcatatttttactgatgtcgataaactctttttcgttaatgagatcttttgcgataaaatcatcaaaaataagagatgtgtcatatttgctgtgataagcacgggcaaacgctgaaatcaaagacgttaagctggactcatttttcctcatgaaatgatcctccacaaaaaataagattctcctggccaggagaatcttattatacatacaaatatattaatagtaaattttagcataaataaatttttttgtcaatgtttttgctcttaactggacgcgcgatccttcacatagccacgtgacctgtagcagaattcgtctatcaattatgtggactgaatcattagcttttataaaatgcgtacttgcggctgcatccctctttttgcaaatcaggagcggttttctgtctcatggcagcatcttttcgtcgtttcagctgagagagaaatcaagatatgtaacaataaaagcctgagggatctcaggcttttcctaatattacaatccaacagcattccaggctgcttcaactttagcggcatcagttgagccgtagaggtcacgggcagactgaatgagagctgccttggcatctttgaacgtggaagaaggcgtgaggtacgttgttaacgcacggtaatagatttgctgtgatttagatacaccaagttttgtgatggtgttgtaagcggctttgtttggaattccgctgtttgtgtgtacaccgccataatcgccttcatctgtgtttggaaggtttcggtaattggcgtaattgtcaggctggttgtattttgtagggttggacaggctgcgaagagcaggctggctgaccgtaatgtcttcaccgatgtcccagtcttctgtatcgttaaaatacccgaatacgtcagagaaagactcgtttaatgcacctggctgattttcataaatcaagttggctgtttcttgggtgacgccatgtgtcatttcatgcgctgtcacatctaatgagccggaaagcggagagaagaatgaaccgtcgccatcaccgtaaatcatctggtctcctgtccatgcagcgttattgtattgagtgccatagtgaacggaagaaacgattttactgcctttgttatcatagctgtttcgtttaaagtttgaataaaaataatcgtacactttaccgaggttatagtgtgcgtcaacggctgcccgctgtgatgaagatgtaaatgttttcgttgtgcttgagacaagcgttcccggaaggcggctttgtctgttttgcaaatcatatgtgatgatttgggtgcctgttggttttgaaagatctcttagaacatattttccgccttcataagagatgttcaaaggaacagttgcgccctttagagttgttccgcttccagtggcggcggcatgttctactttattttgctgttttaaaatgctgcctgtttcggcgtcaactaagacttcccagtttgcaggttcaggctcgacatagcgaatcgtcacgtcgtaagcaagacgatagctgccgtcttttgtttctatggctttcaattcggctttattgctgtttttggccgctccgttagaaacagcgtctggtgatttgccgatagctttgaaagcgagtgccagcgctttttcagaagagactttttggctgttatctgtttttgcagcagattgattgtgtaattcaccattgaccgcatagacattatcggatttatcgacgtgaacgatcacttgcgaatctttaattggcactccgttaacgacaggcgcatatcgaaagtgcttgtatccaagggcatcagtcgtgctttcaacaagcttcagccttttggaaggatcacctttaaaaatgttgctgttctttttcaaaaactgcttgacagccttgtcatttggtgcagagagttctgattgcgcaatcgcatttttggagaggaaatttgtttgattctctttaagctgatgaccttcagcagcctgaacacctggcaggctgattgataaactcataaacgaagcagcgacagcaacagacaatttcttacctaaacccacaataaatccccctttttgaaaatactgaaaactttatattgttatattaaactagcattctggaatactcaacaaaaactaacataactagacaaaattgatagtattgtcctgtgtttgtttttgttgaataatatcaagatgagtcaagtgtcatgtggtggttcattcaagagttatgttttttacatatcaaggggaagatgagatatttttgtttcatcttgaaactttttgaaaagtccgctgtctaaccgaatgaggccttaataagaagtaaaggattgttgttcgtgttggagttattcagtcattatgtattgcatttcgaacgttattttatattaagcagacaaagcaccctgctgattcaatggtcaattgttgttctggcgggtttatatcttttggggcatcatcccaaaataaaccggcagcgcacaatgttcatggcgggtgttatattgcggattgtgctgctggcgggagtgtctgttgaacttattcaccaagtgcaatcaacaaacttcaccagcgcttacttaagagaggacggaaatgaactgctgccgctgctgcattttttgttatacggatatgtgctgctaacggcttttcactatatgctgatgccgcgtgatcatggcggaaagggtaagttttatacgttcgaccttgccgttgtcagtttgccaatcgtacaaatgatttttagtttcttttcgtattggaaggaatacccggatgggatggagccgattgcattcgtgtttctgtttttcatcatcactcttcccattgcgttgaatgtagtgtttttcaagctgcattggagaacggataagatcttactaggcttattttatacgctgattatcggactgcttgtcttgctgcttgtgccatatcccaatcaaatctcaaaagattatggtgcagtaatgccatatacgatttatttggcaatggcgggatttttgatgagctatcatctgttccaaaagtcaggaaaggtttatgtgcgtgtgaataagtgggtgacgatggctgtcctggtgttttttgtcctgctgttaaatccgatatataacataggaacggctgctttcgctgtatcaaagccagcaaatgtccatgattcattcaattttgtcggggagcacatttcatcagaaaaagcggaacagatactaaagtcattttttcctacggatgaaacactttatttgcacgatacaaacatggatgtgcattatttctactcatttgaaagcaaaggttacaaagctgaggtagatgaagtatcgcagctgattcgtaattatgaatacttacaaaaagcacatgggaaaaagctaacgaatcaggagtacaagcgaaagtccatcgctttccttgagcgacacggacgtgtgttacataaggatcatatcgaaacaaaggtatctcaagaagacggccagacagtcgtacgtatttacctgaaaaaccagcttcataaaaaagatcatgctgatgatggcgcggtattttattgggaaaaggaaaccttaatggggtttagtgaagatccttcgatttatcagcttgactctcttctgcatgttcatataacggaacaagacattcacgacaaagtggaacaaatgtttacagcgctgaacatatcaaaacagccttatcagatcactgatattgaaagcgacagcctgcttggaagcatggtgagagttgaaacaaaaggtggaattgttttggaatttgagggcgaatcaggttgtttacatagtctttcgcttccgatgaaaaagaatatctcaatggctaacagccggctgcagcatcagatattatcgatcttcgatgctcgtggatcagaaaagaagaaaaaaagcagtcagggtgacatggtgatgtatactgattcttctaaaacatatgagtttgttgaagctcaaggtcagctaaacgtttatgtatacagcgatacacctgatcagtcattcccctatacgtatcgtaatggaacattggcttacgaaaaagtagcttctctatatcaggatgtcatttacaaaaagcgtatgcgtccgattatcgttcaaagaggggatgaacggcattatgcatggctgatcattattcagccgtttggttcaaatcgccatgatgcctatgtagtggatggagaaacacaagaggtgaaaagtctttatgaatcataaagaaaaagagtctgtttttgtagacttatacgacctgtataaagaaggagagctagaggatgaatcaatggaatggatgaaacagcatgaatccctatttcaaaagaatgcggaagacttaaagagtaaaacttgtttaaagagaagtcccggtgctgaagaagaaagccaaatcagatatatgaaagtatacctgtcttccatgtatatctgtttcattttattggccatttggatgacggtgtggttttacttttaatgaagcatagggattccattgaggacttgtatcggcagtattatcaagaaattttaaattatttattcagaaggactcatcatcttgaaacagccaaggacttagcgcaggacacgtttgtgaaagctcttaatggtctggcttcgtttagggggcattcttccatcagaacatggctctacaccattgcgcatcatacctttatcaattggtaccgaagggatgtcaaataccaatttactgaaatcagcaaaaatgaagggttaacgcaaacaacttatgagcagcctgaacagtatctgtcacgaacggtgaaaagcgaaacactgcggcaggagctcctgaagttaaaagatcagcatcaatccgttttgattttaagagaattccaagagctttcttatgaagaaatcgctgagatattgggatggagtctttctaaggtgaaaaccacattgcaccgggctagattagaacttaagaaacacatgacgaaaagtagagaggaggagcggatatgacctgctttctagtaagagacctgcttcctctgtatcttgaaggtgattgtaaaagagaaacggaacacgttatagaagagcatttaaaaatgtgcagcagctgcagagacatgtatgacacgatggctgagccatttgaattggaaagcgaacaggccgttgaggaggcttatctgccggaagaagaactgcgttttaaacagaggtactatggattactgatcatgaaagctgcctgctggtttggagcggtggttgccatgatgctgatcatcaaactgctgatataaaaaaagcgcttgtccgattccggcaagcgcttttttacattaagcctggggatgaatcatatcgtaaatagcggcaagctgttcttgtgacagggcactgaagagtttttcataaacgtcagcttgcagtggcgttgcacctgcttgtagcgctgcgtctttatcatagctgtacacatcatcttgtagcacaatggctgcttgaagaatgtgaatcttgagagaaacagcggagaaaaattgttcaagtgcaagtgcttctttttctgtgaagccaagttcaattgctttttctgtatcaaatttgtaatttccatcctcgagatacacacattgtgaaacaatgctgaaaaattctgatgtcgattcccagagtgtagcaattacctgagcctcttcttttgtcattcctaactcgacagctttttcgctgtcaaaataatatacaccgtcttgttcgtaaatacattgatttaatatatcaatgaatgtattgagatcttcgttagtgctcgcctgatgctggagttgaacagcagtgttatcaaccggtgtttttgcgctggctgcatcagaaccgaacgttaatagagcagctgaggtcattgcggcagtcgttaacatagctttttttacaaatgttttcttcatgtttcttctctcccttttatgaattgtgctacaaattccattatagggagtagtttccggtgaaggaataggcgctatggtattttatgtgtatcgttgccgaactactttttgaaggctgcacgtgtgatcgttagaacgattgtctatgtatgaaggctgttttgcatcttcctgactaagaaacaggggagataaggcttaaagaaatgaaaaacaccgctttctttgcggtgttttttgattacaatgtcgccggcggggcaatgcttttaatcaagcaagccttgttcgcgcattttcttttttaatgtaaatccgccgcccatgacagcgcaaacaagtacaatgctggcgataatgcctgcagggcttttttcagcgataaagacgccgatcagcataatgctgaaaaccgctgcaaatgcaaataatagtaaaagccaattcatttttttcataaattccatccccttttacgtcttatattaagtttacagaaaaacgtgacgcttttaaagaggatgtgtgatataatatgaaagttatctaatttttttaggagatgaaaaagtgaaacttcgaaatgatcttcgcaacatcgcgattattgcccacgttgaccatgggaaaacgactctagtcgatcagcttttacatcaggctggtacgttccgtgccaacgaacaggttgctgaacgcgcaatggactctaatgatcttgaacgcgaacgcggcattacaatattggcgaaaaatactgcgattaactataaagatacacgtatcaatattttggacacccctggacacgcagactttgggggagaagtagaacggattatgaaaatggttgacggcgtagtgcttgtcgttgacgcatatgaaggctgtatgcctcaaactcgttttgttctgaaaaaagctcttgagcaaaacctgaaccctgttgttgttgtaaacaaaattgaccgtgactttgctcgtccagaggaagttatcgatgaagttctggatctgttcattgagcttgatgccaatgaagagcagctcgagttcccagtggtatatgcttccgcgattaatggaacagcgagtcttgatccgaaacaacaggatgaaaacatggaagctttatatgaaaccattattaagcatgttccggcacctgttgataatgcagaggagccgcttcaattccaagttgcccttcttgactacaacgactatgtaggccgtatcggaatcggacgcgtattccgcggcacaatgaaagtcggacagcaggtttctcttatgaagcttgacggaacggcaaagtcattccgtgttacaaagatttttggtttccaaggcttaaagcgtgtggaaattgaagaagcaaaagcgggagacctagttgcggtttccgggatggaagatatcaacgttggtgaaacagtatgtcctgtagaccatcaagatccgcttccggtgcttcgcattgatgagccgacacttcaaatgacatttgtcgtgaataacagtccgtttgcaggccgtgaaggcaaatatgtaacggcccgcaaaatcgaagagcgtcttcaatcacagcttcagacggatgtgagcttgcgtgttgagccaactgcttctcctgatgcttgggttgtttcaggacgcggtgagctgcacttgtcaattttaattgaaaatatgcgtcgtgagggctatgagcttcaagtgtcaaaacctgaagttattatcaaagaaatcgacggcgtacgctgtgagcctgttgaacgtgtgcaaattgatgttcctgaagagcatactggctctgtcatggaatcaatgggtgcccgcaaaggcgaaatggttgatatgatcaacaacggaaacggccaagtccgtctcatctttacagttccttcccgcggattgatcggttactctacagaattcctatcattaacacgcggattcggtattttgaaccatacgtttgacagctaccagccgatgcaggcgggtcaagtcggcggacgccgtcaaggtgtacttgtgtcaatggaaaacggaaaagcaacatcatacggtattcaaggaattgaagaccgcggtgtcatcttcgttgagccgggtactgaagtatacgaaggaatgatcgttggagagcataaccgtgacaatgaccttgttgttaacgtcagcaaaatgaaacagcaaacaaacgtccgttccgcgacaaaggatcagacaactacaattaaaaaagcgcgcatcatgtctcttgaggagtctctagagtacttaaacgaagatgaatattgtgaagtaacacctgaatccatccgtttaagaaagaagatcctcaataagaacgaacgtgaaaaagcagctaaaaagaaaaaaacagcaggattgtcttaatctcgtgcagaatttgaaaagatagaacccgtacgtttacaggggagggaatctttttgaatgacgtaagcgaacgtctgtcgttcttcgccgctctatatcaagtagaccggcagcctgcggcaggcatgtggctgctgtacggcacgatttttgtgttggccgttattgtatttaagcttggatttgctaaacggcttcctgtattaaaatctgcagtggtgtatgtatttttggcgttgggctgcactgttttgacttttttaggggtgtttttgcccgtggcagaaggattggtcgtcgctgcgctgattttaatcacttacaaaatccggctgtatcagtcgaaaaaaggacagtctgcaaaatcataaaagactcagctgaaagctgagtcttttttgtgttctgtatggttaagcggccgctttattttttgactttttcttttttctgctgtcccgggtgaaaagtaaattttcccgttttcagccgttcctctgtttttttggcaatccgatcgtgacattcctggcacatatatgtatggatcgggcggtttcgaagccgtttcgcgatcagggtatcatcatcaattgtttcaattttatcgcaaatagaacatttgaccctcatcatatcacctctttcactaacatgtattatagcacggatcagaagctgtccaaaataagaaaaagctaaagcgcaaggctatagcttagtcattgttgttctttttcatatgatgatcagattgatcgttttgctccttctccatttcctgctgctgttttctatttaattggtcattttgctgctttgtttgcggttcgtcttcattgtcaatcacgtcgttaggcacttcgggaagcactcggccgacaattgcagctaattcatccagtatgcctgttaccggatggccctcgctgatttctctgctcatttcacgaaggcggctgaccgtatcgggatcagcaatgaccactgcgtttgcgccatatcgatcattctttagcgcctgagctacagaatatttaatggtttccactttgcttctgtccaaagtatcatcgacatcaatcccaacaacagcatagcctcccagcacaacggctgttgcatccttgacgtcggggtttttttcagcaacgctgacaagatgcttggcaatatcggttcttgttccattgtcttttgtttcttgagttgtgtcctttacgtgaatcggtttagtctcctgctgtcttgttgattctttttcaacattctgaccctgttttccttgttgataggcacaagcggacaggataagtgtcagctgtatgataatgaaaagaattcgcacttgcgggttccctccttaaaatgctttcattaattttattgttgaattaaccttctatctttatgcacaaaaacatatattttagcaggcattcacctttttcatcaaaagagaagcaggaagaactttgacccttatatcaggaggctgagacttgagtaaaatttatgtgttagatacgaatgtgttgttacaggatcctaacgcaatattttcttttgaagaaaatgaggttgtcatccctgctgtcgttttagaagaggttgattcaaaaaaacggtatatggacgaagttgggaggaatgcaaggcacgtatctaagctaatcgatgcgctaagacaaaagggcaggctgcatgagcatgtaccgcttgacaccggcggcacactgagaattgaactgaatcatcgttcgtttcaccagctgcaagagatctttattgaaaagacgaacgataatcgcatattagccgttgcgaaaaacttaagcctcgaggaagaaaccaaggaaaatggcaggccggttatcctcgtcagtaaggatgtactggtcagggttaaagccgacgcaatcggactgcttgctgaagatttcttgaatgaccgggttgtggacaatgatgaaatgtacagcggctataaagatttatatatcagccagcagctgttcagctctttttacggaaaaaatcaaatttcagtaaacgatgtgaaacagcatgcgttttatccgaatcagtttgctttaatgaaggatgagctaggaggatcctcctcggcagtcggaattgcagataaaaccggaacggtattaaaaagactcgtatttgatgatgaacatatatggggaatcaggccgaaaaatgtacagcagacaatggcattagagcttttgctgcgggaagatattccgcttgtcaccctgatcggcaaagcgggaaccggcaaaacgctcttagctttggcggcagggctattacagacagaagacttgggaatatataaaaagctggtcgtcgcaaggccgattgttcctgttggcaaggacatcgggtatttgccaggcgaaaaagaggaaaagctaaagccttggatgcagccgatttttgacaacttagagtttctgtttaatgcgaaaaaaccgggggagcttgatgctattttggcgggaattggctcaattcaggtagaggcgctgacttatatcagagggagaagcattccagatcaatttattatcattgatgaagcgcaaaatttgaccaggcatgaggtgaaaactttgctgacgagagtcggtgagggcagtaaaattgtcttaatgggtgaccctgaacaaattgatcacccatatttagacagtctgaacaatggtttagcctatgtggttgagcggtttaaaggacaacccatctcaggcagcgtgaagctgttaaaaggtgagagatcaggtctcgcccagctcgcagctgatttgctgtaacattaaatgatttcgatctcttttacgtcggtaatcggctgtttgtgatgaaccgggtcttcaaagtaaatatgcacggggccgccttcttgaatcggcttgcctgcctcactgaaatggacaatactgttcagagcggtttccagagaaacggcggcctttcccgaacttgtgacaaatacacattgcgtcgcagagctgttcggctcagcatttttcaggacagtcccaagtctcattgcgaaactgccgttcatcagtttttgcttctcatattgcttttccgtctttaatgtaggcggcgcaattcgcccctctctgatgacgcgttccggatcaaggtcggattcatccccggctgattgtaaatatatgtcttgactgtcccctttgcggtcaaacgaaaatttgcgatcatcaaaaatccatacgcttggatcaatggtaattgggtatgtaacattgccttttacttggataacgctcatgatatgacccccttctctcaaaattataaaagttttcgcatgaattgtcactttgtgtacaaattatgtgtattgaaatgctgagggaacgagggtgtttgcatggtatgccggcataatgatgagcttgaagccttagtgaaaaaggcgaaaaaagtaacggacaagggggagatagccagctatattcccgccttggcaaaagctgataaacacgacctgtcagtagcgatttattattccaataatgtttgtctgtcagcaggtgacgtagaaaaaacatttacgcttcaaagtatatcgaaagtcctttcccttgctttggtgttaatggaatacggcaaagataaggtcttcagttatgttggacaggagccgaccggtgatccgtttaactcaattatcaagctcgaaacggtgaatccgagcaagccgttaaaccctatgattaatgccggggcattggtagtgacaagtctgataagaggaagaacggtgaaagagagacttgattatttgctttcttttatcagaaggctgacaaacaaccaagagattacatactgccgggaagtggctgaatctgaatacagcacttcaatgattaatcgggcgatgtgttattatatgaagcagtacggcatttttgaagatgatgtagaggcagtaatggatttatacacgaagcaatgcgcgattgagatgaacagcttggatttagcgaaaatcggatctgtatttgcattgaacggcagacatccagagactggggagcaagtcatctcaaaagatgtcgctagaatttgcaaaacatttatggtgacgtgcggaatgtataatgcaagcggggaattcgcaattaaggtcggaattcctgcgaaaagcggcgtatccggcgggattatgggcatttcgccttacgatttcgggatcggcatattcggccccgcattagacgaaaaagggaacagcattgcaggtgtaaagcttttggaaataatgtctgagatgtacaggctgagtattttttaatttatgtcatatgcttaaatcctcttgcattttctgttgataccctttatgataaatagaagaattaggtactcgcctggggaacggagggatacttttggcttcagagatgatagttgaccatcggcaaaaagcttttgaactcttaaaagtggacgctgagaagattttgaagctgatccgagtacaaatggataacttaacgatgcctcaatgtcctctatatgaagaggttttagatactcaaatgttcgggctttcgagggaaatcgattttgctgtccgcctgggattggttgatgaaaaagacggtaaagaccttttatacacattggagcgcgaattgtctgctttgcatgacgcgtttacagctaaataaatgataaaactcaaacttattaacagtttgggtttttttataaccgctatttttctctcatctcataaaagacggtctttttttacacattccttccgaatcgtatagagattcttcgtctcgtttgataaattgtagtaaaataaaaaagataaatacataaaaaccatagataatggaagttagaagcagggaagaggatgttatgttaaaaaaaatgctaaaatcttatgattactcactgatattcgcaatcgttttattatgcggattcggtttagtgatggtatacagctcaagcatgattacggctgtctcccggtatggagtaagcagtaattttttcttcatgcggcagctgtttgctttaattgcgggtggcgctctatttattctcatggcgttgtttccttataaagcactggcccatcaaaagtttcagaaggggatactgcttgtatctgttcttgcgcttatctcactgtttgttttcgggcatgttgccggaaacgcgcagagctggtttaaaatcggcggaatgagtattcagccgggggagtttgtgaaactggtcgtgattttataccttgcagccgtatatgcaaaaaaacaaagttatatcgaccatctgttaacgggagtagcccctccggtagtcatgacgcttgtgatttgcgggttaattgccatgcagcctgatttcggtacagccatgattatagggttaattgcgacgtgcatgatcttgtgctccggtttcagcggaaagacgctggtgaggcttgtgatactgggcggaattgttttcattttagtcagcccgattatctatttgaatcaggacaaaattttaactgaaggccgtttagcgcgttttgagagtcttgaagacccatttaagtatgcaaattcatcaggtttgcaagtgatcaattcttattatgcgatcagctcaggcggcattttcggcctggggctcggtgaaagtatccaaaaatacggatatctgcctgaatcacacactgactttattatggctgtcattgctgaagagctcggcatttttggggtattgtttgtgattttcttattgggttttgtcgtcataaaaggtttttatattgccagaaaatgcgaggacccgtttggaagtcttctggcgatcggcatttcaagcatgattgccatccagtcgtttattaaccttggcggtgtcagcggattaattccgattacaggggttacgctgccatttatcagttacgggggctcttctttggtgctgcttctggggagtatggggatattagcgaatatcagcatgtttgtgaaatattcagagaataagaaaaagaaagagcccttggcgccgaagggaatgaaaaagaaacagctcaaaaaaactgtttatctgtaaaaaacaagtgtgtacaggggaaggatattccgctatgatagattatattccattcgggtaagggggagaaaagtttgtctcagcaatcgatacaaaaagtattagtagcaaacaggggagaaattgcaatccgaatattccgggcgtgtaccgagttgaatattcgtacagttgcggtctattcaaaagaagattccggttcctaccatcggtacaaagcggatgaagcatacttggtcggtgaagggaaaaaaccgattgatgcttacctggatattgaaggtatcattgatattgcgaaaagaaacaaagtcgatgcaattcatccgggatacggtttcttatctgaaaatattcattttgcgagacgatgtgaagaagaaggcatcgtattcatagggccaaaatccgagcatctcgatatgtttggtgacaaggtaaaagcgcgtgagcaggcagaaaaagcgggaatccccgtgattccgggaagcgacggtcctgccgaaacgcttgaagccgtcgaacaatttggacaagctaacggttatccgatcatcattaaagcctcgcttggcggcggcggccgcggtatgcggattgtcagatctgaaagtgaagtcaaagaagcatatgagcgtgctaaatcagaggcgaaagcagcctttggcaatgatgaagtttatgtagaaaaattaattgagaatccgaaacatattgaggttcaggtcattggagacaagcagggaaatgtcgtccatctttttgagagggattgttccgttcaaagacgccatcaaaaggtcattgaagtggcgccgagtgtctcgctgtcacctgaattaagggatcaaatttgtgaggcggcagttgcgcttgctaaaaatgtaaactatataaatgcggggacggtagaattccttgttgcaaacaacgagttctactttattgaagtaaatcctcgcgtacaagttgaacacacgataacagaaatgattactggtgtcgatattgttcaaactcagatccttgttgcccaagggcacagccttcacagcaaaaaagtaaatattcctgagcaaaaggacatttttacaatcggctatgccattcagtcacgggttacgactgaggatccgcaaaatgatttcatgcctgatacaggaaaaatcatggcttaccgctcaggcggcggttttggtgtccgtcttgataccggaaacagcttccagggcgccgtgatcacaccatactatgattcacttctcgttaagctttcaacttgggctttaacgtttgaacaggcagctgccaaaatggtacgaaaccttcaggagtttagaatcagaggcataaaaacgaacattccgttccttgagaacgttgcaaagcatgagaagttcctgacagggcaatatgatacgtctttcattgatacaactcctgaattatttaaattccctaaacaaaaagaccgcggaacgaaaatgctcacttacatcggcaatgtgacagtgaacggcttccccggaatcgggaaaaaagaaaaactggcgtttgacaaaccgttaagcgtaaaggtagacgttgatcagcagcctgccagaggaacaaagcaaattcttgatgaaaaaggtgcagaagggcttgcaaattgggttaaggagcagaaatctgtccttttaactgatacgacattcagagatgcccaccaatcgttattggcaactagaatcagatcgcatgatttgaaaaaaatcgcaaatccgacggctgcgttatggcctgaactattcagtatggaaatgtggggaggcgcgaccttcgatgtagcctaccgattcctgaaagaagatccgtggaagcgtttggaagatcttcgcaaagaagtgccgaataccttattccagatgctgcttcgctcatcaaatgcggtcggctatacgaattatccggacaatgtgattaaagaatttgtgaagcaatcagctcaatccggtattgatgtgtttcgtattttcgacagcttaaactgggtaaaagggatgacgttagccattgatgctgttagggataccggcaaagtggcagaagctgcgatttgttatacgggagatatccttgacaagaaccggacgaagtacgaccttgcatattatacatcgatggcgaaggagcttgaggcggccggagcccatattctcgggattaaagatatggcagggctgttaaaaccgcaggctgcatatgaactcgtttctgcgttgaaagaaacgatcgacattccggttcaccttcatacgcatgatacgagcggaaacggtatttatatgtatgcgaaagctgttgaagccggcgttgatatcatagacgtggcggtcagctcaatggcgggattaacgtcacagcctagcgcgagcggattttatcatgcgatggaaggcaacgaccgccgtccggaaatgaatgtccaaggcgttgaattgctgtcccaatattgggagtcggtgcgtaaatattatagtgaatttgaaagcggaatgaagtctccgcatactgaaatttatgaacacgaaatgccagggggccaatacagcaacctgcagcagcaggccaagggagtaggccttggcgaccgatggaacgaagtcaaggaaatgtacagacgcgtgaacgatatgttcggtgacatcgtcaaggtaacgccttcctcaaaagttgtcggagatatggcactttacatggtgcaaaacaatctgactgaaaaagacgtttacgaaaaaggcgaatctttagatttccctgattctgtcgtggagcttttcaaaggaaatatcggccagcctcatggcggattcccggaaaaactgcaaaagctaatcttaaaagggcaggagccgattacagtcagaccgggcgaactgcttgagccggtgtcatttgaagcgatcaaacaggaatttaaagagcagcataacttggaaatttcagatcaggatgctgtggcatatgccctttatcctaaagtcttcactgattatgtgaaaacgacagaaagctatggagacatctcggtattagatacaccgacattcttctacggcatgacattaggtgaagagatagaagttgaaattgagcgcggcaaaacgctgatcgttaagctgatttcaatcggtgagcctcagcctgatgccacccgcgtcgtttatttcgaactcaacgggcagccgcgtgaagtagtcattaaagatgaaagcattaagtcttccgttcaggaaaggctgaaagcagaccggacaaatccaagccacatcgcagcttccatgcctggaacagttattaaggtattggctgaagcaggcacaaaagtcaataaaggtgatcatttgatgattaatgaagcgatgaaaatggaaacaacggttcaggcgcctttctcaggaacaatcaagcaggttcatgtgaaaaatggtgagccgatccaaacgggagatctgctccttgaaattgaaaaagcataataaacaaagagtgtatatcatttgatatacactcttgtttttttatatagaaaatgtggagtgaaacagatggttagaagagatataaggggacttcagagattatacaatactgtcacaagcccaaaataaatagaggcttatacagccaatattttagatgctttgtagtatgccgtgcatatttctttaagcactatctgatttaaaaggctttaatacttatgttcgcgggctatagatgcatatgaaatttctataatcacgatgagaaaggggacagcccgaagtgagccgctcactgatcatcaagttcagcgaaggctggcgattgaaacaataaagcgccaaaacaagacctgaaaaaagaccaaagccgcctaaggctttggtctttagtccttatgattgactagattcgtaacggaaacgagcaatcaataataagaagtagcatagaacgccaaacagacaggcaataaagaacgagtgggcaagtgcaaagcccagagccagttcagagtatacgatcataatcccggacagtgcctgtaatgtaatgaaaataagacatgagatccatccccaaaagatctgtttttgatctttataggagataatagcatgaacagcggcaacaataatccatacaaataacagtaaggctgctgctctgtggcccatttgcacccattcatggaattgggtcggaagcccattgttcagcgggctgcacagcggcacatcaggacatgccagacttgattcagtgtgtcttacatatgcgcctgtatacacaacgatataggaatatattaaaattcctatcatgtgaaattgcatctttttgccgatttgaagcggcttaaccagtgttctgactgatttatcagcttcaaatatgagcaatgttaaaataagcactgaagcaaaagaaattaatgagatgccgaagtgaagcgccataatcagcgcgttcgaaccgaatacgacagccaatgcgccaagcaatgcctgaagaaataaaaagataattgacatgatcgcgagaaacgttgtttcacgaaaaatcggcgtgatttttctccatgaccaaaacgcaaggcttaacacaaggacaatagagattccgcttgcgaatcggtggctccattcaataattgaagccggattcagttcagggaaaaaacggccgtgacacagcggccactgtctgccgcatccttggccggaacctgtttttgtaacgagggcacccccgattaaaacaattagcatgacaaatgtcgtcagaacaccgagagcttttaatgctttattcatacaatattcaccttcttaacatactgctgcaattttatatacgttccaagtgtaagcgaatatgtgttttgtggcaattcccagagccttttgttcacaaaaatataatagaatgacggcttctggaaaatgtacacttgattattcatgccgggtctgatagaaataaggtaaacgcaatgccgatttggagattgccttcatctttggtaaaattcataaaaagttcacaaataaattcctgtttgtcgtttaatatttaataggatgtttttttacaagatgttatcttgtatgatagagttgcaggttattttattctcctgcgttaggtttgtaagggaggtttacgttatggctaactccagaatcttaaatgatacagctatagacggacaaattgaagaaacaacggcatggaaagattttctgtcccttattaaaatagggatcgtcaattctaacctcatcacgactttcactggaatgtggcttgcactgcatatatccggtttaagttttttaggcaatataaacaccgttcttcttacgttaatcgggtcttcactgattattgcgggctcctgcgcgatcaataactggtatgaccgggacattgaccatcttatggagcgtacgaaagtaagaccgacggttacgggtaaaattcagccgagtcaggcgttatggtctggaattttgctggttgctttaggattgatcatgctgctgatgacaactgtcatggctgctgttatcggttttatcggagtctttacgtatgttgtattgtacacaatgtggacgaaacgccgctatacgattaacacagtagtaggaagcgtttccggtgcagtgccgccgcttattggatggacggcagtggaagggaatatcggtgtcgtagcatgggtgttattcatgattttatttatttggcagattcctcacttcttagcattggctattaagaaaacagaggattacagagctgcaaatattccgatgcttcctgtcgtatacggatttgaagtgacaaaaagacaaattattgtgtgggttgcgtgcctgatgccgcttccgtttttccttggtagcctgggtcttccgattgtcattctcggcttgctgttaaatatcggctggctgattcttggcttaatgggattccgctccaagaatatcatgaagtgggcaacacaaatgttcgtttactcgcttaactacatgacaatctatttcgttgccatggttgtcttgacgcttttctaaaaaatagatatgatgcttgttttatcgcttcaaaataaacgatgacaactagtaaatgccgccttgacctcttgtttaatcaggcggctttacttttatacatagatggcattttgagtaaaaaaactcataatttaagagaagaggaaatgtaagtgctttattggtgataggttggatggcgatagatttcgatccgctttccgcctttgtattgaccagaaaaggggttgggtgaaatggtaaagcattggcgtcttattttattattagccttagtgccgcttctattaagcggatgtggaaaaccttttttatccacgctcaagcctgctggcgaggtggctgataaacagtatgacctgacagtgctcagcacattgattatggtggttgttgttgcagtagtatctgttatcttcttttatgtgattgtgagattcagaagatcacgggtcggtgagaacacgataccgaaacaggtagaggggaataaatttttagaaatcacatggaccgtgatcccgattttgctgctcattattcttgtgattcctgttgtattatatacgctggagctagcggacacatcaccaatggataaaaaaggccgcaaagctgaggatgctcttgtagtcaatgttagggcaaatttatactggtgggagtttgagtaccctgattacggcattatcacaagccaggagctgattgtaccgacagatcagcgtgtatattttaatttaaaagcctctgatgtaaaacattccttctggattccttcagttggaggaaaacttgatacgaatacggataatgaaaataagttcttcctgacatttgattcaaaacgaagcaaagaggcaggagatatgttttttgggaagtgtgcagagctttgcggcccttcacatgcgctgatggattttaaggtgaagacgatgtctgcaaaagaatttcagggctggacaaaagaaatgaagaactataagtctacagcagagagcgatttggctaagcagggtgaagaactgtttaaagagaaaaactgcctgagctgccatgcggtagagccgaatgataagcgtgcagaagccgctagaacggcacctaacttggcgaccttcggtgaaaggacaaaagtggcaggggtgaaagaggccaacaaagaaaatgtgaaggcttggctgaaggaccctgacagtataaagccggggaacaaaatgacaggcacatatccaaagctctcagacagcgaaacagatgcgctttatgaatacttaaaaggcttaaaagcggaaagcaagtagggaagaaagggagatattgggggaggtcacatatgttgaatgcgcttacagaaaagcggacgcgcggatctatgctttgggattatttgacgacggtggaccataaaaaaatcgcgattctttatttagtggcagggggattcttctttcttgtcgggggaattgaagcgatgtttatcagaattcagcttgcaaagccggaaaatgcgtttctcagtgctcaagcgtacaatgaagtaatgactatgcacggaacgacgatgatctttctggctgcgatgccgctcttatttgccttgatgaatgcggttgtgcctttgcagatcggggctcgggacgtttcgtttccatttttaaacgcgcttggtttttggctcttctttttcgggggcattttcttaaatctaagctggtttttgggcggagcgccagatgcgggctggacatcatatgcctcactttcgcttcattctaaagggcacggcatagactttttcgtcctcggactccaaatatcggggctcgggacgctgatagccgggattaactttttggccacgattatcaacatgagggctccgggcatgacgtatatgaggctgcctttgtttacatggacgacatttgtggcctcggcattgattttgttcgcgtttccgccgcttacggttggattggctctcatgatgctggatcggctgttcggaaccaatttctttaatccggagcttggcggaaatacggtcatttgggaacatttattttggatttttggccacccggaggtttatatcctaattttgcctgcattcggtattttttctgaggtcatccctgtgttcgccagaaagcgtttgtttggctattcttcaatggtttttgcaatcgtgctcattggctttctgggctttatggtttgggtgcaccacatgttcacgactggtctcggcccgattgcaaatgcgatttttgcggttgcaacaatggctatcgcgattccgaccgggattaagatttttaactggctgttgacgatttggggaggaaatgtgaagtatacaaccgctatgctgtatgctgtctcatttattccatcctttgtgctcggcggtgtgacgggagtcatgctggcagctgctgcggctgattatcagtttcatgatacgtattttgtggttgcgcacttccactacgtcattattggcggcgttgtattcggccttttagccggtgttcatttctggtggccgaaaatgttcggtaaaattctgcatgaaacgatggggaaaatttcatttgtattgttttttatcggctttcacctcacgtttttcattcagcattttgtcggcttaatggggatgccgcgccgggtttatacgtttttgccaggacagggtctggaaaccggcaacttgatcagtacaatcggggcgttttttatggcggcagctgttattcttctgctggtcaatgtcatatggacatcggtaaaaggtgaatatgtaggtgctgatccatggcatgacggacgtacgctggaatggaccgtttcttcaccgccgccggagtataactttaaacagcttccttttgtcagaggacttgatccgctttggatcgagaagcaggcagggcacaaatcaatgacgccggcggaaccggttgatgatattcatatgccaaacggctcaatcctgccgctcatcatttccttcggcctttttgttgcagcgttcgggctgctgtacagaagtgattacgcttggggtctgccggtgatctttatcgggctcggcatcacatttattacgatgctgcttcgttcagtaattgatgatcacggctatcatattcataaagaggaactgccgaacgatgataaaggggtgaaggcataatgcaagttcaagaaaaattcaccgcagaaacctttccagcttctcctgaaaaagtaaccctggaagggaaaaataaatttttaggcttttggctttttcttggcggagagactgttctgtttgcgtctctcttcgccacgtttcttgcgcttcggaattcaaatgccggtgatccgcctacgacggaaatgttcgatgtgacacttgtattcattgccacaatgcttctattaacgagcagtttaacgagtgtgtacgcgatgtaccacatgaagaacttttccttcggcaagatgcagctttggctgggaattacgattttattgggggcgggctttttaggactggaaatctatgagttcaagcattacacccatgaatttggctttactatcacaagctctgcccttggttctgcgttttacacgcttgtcggtacacacggcgcccacgtggcatttgggcttatgtggatcagcacgcttatgatccgcaatgccaagagagggctgaatctgtatacggcgcctaagttttacgttgccagcctttattggcactttattgatgtcgtgtgggtcttcatctttaccgttgtatatttaatggggatggtgggataaacatggtcgataaaaaaagcagagggcatatcaatagcgaccttgaatttaagaaaaaaaagcatgcccgggagatgaaatatcaagtcctgtcttttggtttaatgatcggtcttacgattgttgcatttctgactgtggccacggacggtgtcggcagctggtttacgattcctttcattattttgctagctgcaattcaagtcatctttcagctgtattatttcatgcatatgaatcagaaagggcatgaggcgccggcactgtttttgtattcaggggtgtttgtcgcgtttatcactgtgcttgcgtttgtgacaattatatggtggtaatttgaacagccgccggaggtgaagaaatgaatcagttggagatatttgggtttcgcgcgatgtggagcccttatcttttttgtatcctgttaggcattacggcgctttatctctatttttacaggcgaatgtcttcaaagccgaatcgaataactggtaaagagatggtgtgctttctgtcggcgatgctgtttttatatgcagccgagggaagcccggttgatctgctcggacatattatgttcagtgcgcatatggtgcagatggccgtcctgtatttggttgtcccgccgcttttgatcgcgggaattcctgcatggctctgggaaaaaatcattttcaggccttcaatcaaaccggttttttcctttttttcgacgcctttaattgctttgcttttgtttaacggcattttttctttatatcatgtaccgcttatatttgatactgtcaaaaccgatccattttaccatacattaatcacttggcttatctttgtgcttgcgttcttcatgtggtggccgcttgttcataaggttgagcgtctacggcagctcagcggcttgatgaagctgggttatattatggcggacggtatgctactcacacctgcttgcgccttgatcatgttcagcggtgcaccgttatacgccacctatacagatccggctttatgggctgaggcaatgaggctttgcgtgccagcggatatgatggggcaggtcccattaacagggccagagatgttgaatacactgcctttgttagaggatcagcagctcggagcagtcatgatgaaaatcattcaggaaattgtgtacggtacttttttggccgttatttttttccaatgggtgaagaaagaaagggaaaaggacgggcaggaggagccgccgtatattcagcagacgatatcataaaaggtacagcgaaatatgctgtaccttttcgttacatttgaactgtttttaacatgttggctatgtcctgaatcagtgccttgctttttgtcacaacctgtacgggaaactcttccgtttctccatattctactccatgcgggtagtaatgctttcctaggagaggggacattaattgaatcacggcgcgcccgcttccgacatcgccttctgccgcaataccttgtatccgcaggtaaaacgtaccctcaatcgtcgaaaacttcttgtcataggtgactctctcgtaatcccattgacccgctctaatgagacctttgctttccattaagtcgtctagccagctgagctcagccttaaccccttcaagtccgctttcagtaaacttcaacactgacccctccttataaaaattacctttcctgacaatcatagtatgaaagcgttaaactttcaatgaatcttcttcttttgaaagtatgcaaaaattaaattttgacgacaatagcactagactaaaggaggttaaacggatgacaaaaataaaagatctgatgacagccgacttgcaatattgcacggtattagataatgtatatgaagctgcagtaaagatgaaggacgcaaatgtaggagcgattccggtagttgatgaggacggggaaacattggtcggcatcgtaaccgaccgcgatctcgtattaagaggaatcgccatcaaaaaaccgaactcgcaaaaaatcactgacgcgatgactgaaaaacctgtcagtgtggaggaagatgcttcagtcgatgaggttcttcatttgatggcatcgcatcagctcagaaggataccagttacaaaaaataaaaaactgactggaattgtcacgcttggtgatctttctttatctgagcaaacgaatgaacgtgccggcagcgccttatcggatatttccgaaggtgataatagagaagaaggcttttttcattaacacataaatctttgacatgttaaataggctgtattgtaatgggatgtaaacaagagattgtgaatcgccacgggggtgatagattgaaaaatatattgagagcaatggttatccttttgattatctgcggaacttatgttctgtttattcaatatggatctgttcctgaaaagaaatcaaatgacagcgagcctcaggtgtcgaatgaggaagcgcaaagcggcaaacgaatacatatgccgacttcagggttattgtccttcatgggcaagcccgccgatgaagtaacgaaaaagcttggggaacctgaacgtattgacccttcggcttatgattacgattggtgggtatacaatcaaggtaaggatcaatatatccaaatcggggtattaaacaataaagtggtcacattattcgcgtcgggtaatgatattaacgccaagcctttcaaaattggagaatcaactggcgaagtatttaagaccacccaggtggcaccatttgtgaatgtagagtataaaggaaattcctatcggtttgaattttctgaagaagatatcaatacaagaccgactgtaaaggtaggaaagatgtatgtccagctgtatatggacaaatttgaggggaagctatccagcattagggcgtttgatgcgcaaacctttgtaaagcaaagaccttatgaggtagtgtaccgcggggaattaattaaaccgaaagccgtttcagatgagaaatggaaaaagatccaaacaacgagcgaaaagcaaatccttgatttgacgaatgtcatacgcgttaaacatggacttgcgaagcttgaatgggatcagccaacggcggaggtggcgtttggacatagtgaggatatgaaggaaaataattatttctcccatgtctctaaaaaatacggctcgctgaaagaccgcttagaagaagggcatgttgactttcagcaagcgggagaaaatatcgcatacaattatgtggacggtccggccgctgtagaaggctggctgaatagcgaaggccatcgaaaagcgttgctgaattcagattatacgcatcttggtgtcggagtagaccggaaatattacacccaaaattttattaagcgatggtaatgaaagccgcggacgaatggttcccggctttttctatttccatacaagctggtctgaatgaatgtgctgatagcttacagataaggccgtttcccattccttcagtcaggctttttcaccagtgtatagggatatcgctaaaaattcatttgggaatgaatataggcgaacacaatgcccgacaaaacgatacattgtagtaggtaacgattttcggagggggtgaggattgtggcgaatcaacatgccaatcattcaatcaatgactttaaacaattcgtcaaaaagcatcccaagctgataaaagaagtgcgcaaagaacaaagaagctggcaggacgtatatgaaaattgggtcctcttcggggagagcgacccgatttgggatccgtatcgggaaccggaagaagcttctgaagctgtgcctgaaacaccgcaaaaaaatgattttgtctcgaaaatggtgacagcggtgaaaaagatggatgtcaatcaaatgaacgaacaaatcaataaaatgagccagtcgatctcatcgttgcaaagccttcttaatacattttccggaagcggacagaagcattctcagccaggctctggacagcatcctttttcttttcgaaaggattaaaaaaggggagctcatatgcgcaaagaggttcaggaatatattttagcaaacgaagaacggaaacgattcatcagagaacagccgatatggtaccgcaggctttcaagaaaaccggatgatctgtcctcctttcagcttgaaatgatgaatttttatgaaaaaaccattccgcatcgggtgaatcagtttacgaacgggattcaaatggcgcaaatgatgatgcaaatgtttcaagcgatgcggacaaaagattaaaaggccccgaaaaagggtcttttttcatgcggacataaggttttgtatacggctgcggttaagcattttccaattggctggtttcatggtaaactaacaactggaggtgcatgttatgtatgcgacgatggaatccgtgcggcttcaaagtgaagctcagcagcttgccgagatgattctgcagtcggagacggctgagaactaccgcaattgttacaagcgtctccaggaagatgaagaggcaggtcggattattcgttcttttatcaaaataaaagagcagtatgaggatgtacagcgttttggcaaatatcatcctgactatagagaaatatcccggaaaatgagggagatcaaacgtgagctggacctgaacgataaggtggctgacttcaagagagctgaaaatgagctccagtccattcttgatgaggtcagcgttgagattgggacagctgtttcggagcatgtgaaagttccgactgggaacccttattttgacggtttgtcttcatgcggaggcggctgcagttcaggcggaagctgcggatgtaaagtgtcctgacgagactggccgtctcgtcttttacatataagagaaaacaggcaggtgattgtattggagaataggcgccagggcatggttgtgtatctgcactccctaaagcagagcaaaatgctgaggaagttcgggaatgtgcactatgtatcaaaacgattaaaatatgtcgtactgtactgtgatatgaaccaaattgaaaaaacaatggacaagattgcgtcttactcatttgtgaaaaaagtggagccttcttataaaccgtttttaaaattggaattcgagtcaaagcttgataaggcaaaagaatacgattataaaatcggcatatagctataaaaaaatccccgcaggcatctgcggggtccttctattccttaatatgttaaggagaaggcaaagggagaggagaaaccggaggaagaacttatggggaaacgtaagtcttctccgcggttggcaacaacatcctctagatgctgttgcttatagtatggacaaggatcatgctgcctatacacctgtttatcaagattagcgttcattgtttggaagaatgctttatgttaagataggattgatttttttctatgtacatagcggcgtccggccgaataaagaaacaaaatagcttttagaaaaagtggtgtggaacatgagagtaatttctggatcaaaaaaaggccgttcactaaaggctgtacccggaacatcaacaagaccgacaaccgacaaagtgaaggaatccattttcaatatgatcggcccttattttgacgggggcatgggacttgacttattcgcagggagcggaggtcttggaatcgaagcgctttcacgcgggtttgagcattgtatattcgttgaccgtgattttaaagcgattcaaacggtaaaatctaatttgaaaacgctggagcttacaaaacatgcacaggtataccgcaatgatgcggaacgtgctttgcacgctgctgctaaaagagaaagcggctttcgcggaatttttctcgatccgccgtataaggaacaaaagctgaaagcacttttaacgctgattgacgaatatcaaatgctggaagaagacggctttatcgtcgctgagcatgacagagaggtcgagcttcccgaaaccgtaggagatcttgtgatgacaagaaaagaaacctatgggttaacaggtgtggcgatttataaaaagagggggtagtgaggtggcgagtatagctgtctgtcccggcagttttgatccggtgacctacgggcatctggacatcatcaaacgcggggcgcatatttttgaacaagtgtatgtatgtgtgctgaataattcttcaaaaaagcctttgttcagtgtggaagaacggtgtgagcttctgagagaagtgacaaaagacattccgaacataacagttgaaacatcgcaaggcctgttaattgattatgcaaaaagaaaaaatgcgaaagcgattttaagaggcttgagagctgtatctgattttgaatacgagatgcaggggacgtcagtaaaccgtgtgcttgatgaatccatcgagacattttttatgatgacaaacaatcaatattcgtttctaagttcaagcatcgtaaaagaagtggcgagatacaacggctcggtatcagagtttgtaccgccggaagtagagctggcgcttcagcaaaaattcagacaaggatgagggttttgactcatcctttttttgttccgtttgtcagtctgtaagaaaaaatgataatgtacgtaaacagcgcgcatagtgtgacagcaggtccgatctgcacaagcagattccagccatttataaaggccgttggcatgtcactgctgttaagagatttaaatacatactgatatggatcatgccatgccgtgtaaagaggtttccataaaagcatgacgaagacagcggcataaacgccctgcagcaaacgtgcgataaagaatggtttaaatctaatgtcggtttccgataaaatacctgccacctgagcttgtacggaaaagccgctaaacccaagaataaagctgacgataatggctttttgcagaagagaaacatctgtctcgctgacaagcttgctgcctaatgtaatttcaaacatccctgataaaagcggaatgtccaattgagtcggaagctgaaacaaagtcagtgctccttttgtgaaaacagacaaaacatcagtcagctggaccactgacaacagccgattgaagacagaaaataaaataataaagccgcctaccataagaagcgtttgaacagaagacgtcacggcgtcgcctaaaattttacctaagggccgtttttctgcaagtctggcggtatgaagagcgtgtaaagcatctttgactgaagggaaaggtatcgttttctttcttctgagatgctgctcttccttgcggccataggagcgcattgttaaaccgacggcaagattccccaaatagtgtgcagaagctaataaaatgcctagtgatgcgttttgaaagaaaccgacggcaacagcgccgaaaataaagagcgggtttgaagaattggtaaacgacgcgagccgttctgcctctactcttgaaatctgattttcctgccgcagacgggcagtgagttttgcgcccgctgggtttcctgatgccattcccatagcaagaacgaagccgccgacacccggcacgcgaaagatcggccgcataaaaggctcaagcaaaacaccgacaaaccgcacaatgccaaagccgattaagagttcggacagaataaaaaatggcagcaatgacggaaacacaacctcccaccacatagacagcccggttttagaggcttcgaatgaggcctgtggatgtgagatgacagtcgctgttaaaaaaagaaaaaacgaggcaatcaaaagtgtattaatcttcgacaagttcattcttacctccccgatgctaaaaatgcccaatgacatgtatatcatgataaaataatgtatgatgtaaaacggccaagcagtacctgtcctcttgattctttgtactaatatacgagcataggggttcagtttagaccatagaattcggtatacagggaattcaggcaggaggttaacgctttggccaaacctaaaatcgggttagcgttaggatcgggaggggccagagggcttgctcatctcggtgtgctttccagtttacataagcaccaaattgaagtggatatgattgcaggaagcagcatgggcgctttggtgggcagtttttatgccgccggacatgacgtggcaacgatgaaaaaagtagccaaagcctttaaacgaaggctttatgctgattatacggtgccgaagctcggttttttaaaaggtgaccgcgtcagacagcttgtgcatgcttatacattcggaaaaccgattgaagagctccaaatcccgctgggcattgttgcgtgtgatctacagacgggagaaaagattgtgttccgaaaaggatcagtgtcagatgcagtgagggccagcatcagcatcccgggtatctttattccgcagcggctggacggacgccttcttgtagacggcgcggtcgtcgatcgaattccggtttctgttgtgaaagacatgggagctgatattatcatcgcttcggatgtttccagggttcgaaaaactgaaacagcagtgcatatttttgatgtgattatgcaaagtatggatatactgcaaaatgaattagtgcggcatcaaacaattgccgcagatatcatgattcgcccttcccttgaaacatacagctcaagctcgtttgccaatattgaagaaatgatatcggcaggcgaagaggcgacaaaccgaatgatcagcaagataagaaaagaaatagagaattgggagggctcataatttgctacgtaaaaaacattttagctggatgctcgtcatcctcatactgatcgcctttttatcatttataaaacttccatactatattacaaaaccgggagaagcgacagagcttgcttcattgataaaagtggagggaggctacccggaaaaaggaagtctgtccttaatgactgttaaagtgggaccggctaatccgtttacatatgtgtgggcaaagatgcacccttattatgaaattgttcctgatgagagcattaaggaggaaggcgagtcagataaggagtatatgaaaagacagctccaaatgatgaaaagctcgcaagaaaatgcggttatagccgcctatcaaaaggcaggaaaaaaagtcagctattcctttaacggcatatacgcaagctctgttgtagaaaacatgccggcaaaagggaaaatagaagtcggtgataaaatcatcagcgcagacggcaaaaactatcagtctgctgaaaagctgattgattatatcagcagcaaaaaagcgggagataaagtcacgttaaagatcgaaagagaagaaaaagaaaagcgtgtcacccttacgttaaaacaatttcctgatgagccggatcgggcaggaatcggagtttcgctttatacagacagaaacgtgaaggtagagcctgatattgattttgaaatcgaaaatattggcggcccgtcagcagggttaatgatgtcccttgaaatctataatcagctgacaaaaccagacgaaacaaaaggctacgatattgcgggaacaggtaccattgatgttgacggaaaagtaggcccgatcggcggcattgatcaaaaagtcgtcgccgcagacaaagccggaaaagatattttcttcgcgccaaatcaaaacggcgccagcaattccgattataagaacgcagtaaaaacagcaaaagatattgattcaaatatgaagattgtgcctgttgataccatgcaggatgcgattgattatttgaataagctgaaagcgaaaagcacctgattctcaggtgctttttctatacatttaaaaagtgttgttcatcttcgtcatatcgaatcggtgcatgtccgtattcctgtaggtcaaactcagttctcagcggctcttctatcggcaggctgtaaatcctgcttgcttttacgtccagatcgagagctggatgggagaaagaggacagtttgctgacaagcggaacagacagtgcttttttcttttcggataaataagcctgtccttttttcgtcatgccgagaagcctgatatacggcgccttatcgttgtcaagcagcttttgcatatcctgtttttttgttctggttaaaatgtgtgtattcatccgctggagccttgtccacgtatagcgttttgttttcagcagttccataaattcctgataggagctggattttctgatcgaacgaataattctgtgctctaaaccttcctccacctcgtatacttgctgtaattcccgtgccgttacagttgaaaggctgtattttaagtaagaaaagtagctttcaggtgtatgccacaatccgaaagatttgcggtaagctgctaattcacgtgcagatgcagcagggagaaaacgaaggcaggcttcgagattctggccaatcatcgcttttctaatgcttgtggcacttgctatatggttttcgccttcagggagatcggcatcatgatagtccgaagagattcgtgccgtagtataaggtttcataggatatcccccggttagaatcgaggtcacatactggtatcccaaaatgttatttggttttgacaagtcaagtgcactttcagtatgcaaaatggagctgaaggcgatagccgccgctgctgggtaactggccccctttttaagttcttctttaattcggtcattcaatatatgtttatgctcatcaataagctgtgctgtttctaaaaaaggcttgatatccccattttcactcccgaaaaacagcgcctcacattcaagttcgttcaggatggaaacactgccgcgtgcaaaaatgtctgctttttgcacggcataaagataaggcagctcaatgacaagatcaactccgctttgcagcgccatttttgttcgggcccattttgatacaacagcgggctccccgcgctgtaaaaaatgcccgctcatgaccgcgacagccgtgtcacatccggtttgccgctttgctgtttgggcatgataaaggtgaccgttatgaaagggattatattcaaccaccaatccgacagctttcatattttttccgcctttcttgctatgtttaaaaacgtatggtacatttgcaaatgaaaactcttacgccttatttttgttttaagtgtatgcatagcatattccgctgtcaacgatacttcaatggcagcattatgctgtaaagaaaaaatattgacaaaaacaatcttaaaagctataatcatgtttgttgctttcctgaggtgatacaaatgaaatggacgatttatcagctgcatcaaatgccaaaacaaagttttgagtttgatgaaacagttgagttaaatgagctgacaaagctgaattctgacattcgccgcatttctcccgtccgggtgaagggcagagcggatatcaaatccaaacaggtttcgtttgattttacaatttcaggcgaaatgattttgccatgctcaagaacactcgttgatgtcccgtatccatttgaaatttcaacaaaagaactgtttatatttcatcacacggatgatatagaagatgatgacgttcacattgttgaggacgatactatcgacttaactccgatcgtgaaagaagaaattcttttagaaatccctatgcaaatcttttgtgaatctgaacaagaaaaaggagctgctcctcaagaaggaaaggattggcaagtcatttcggaagaagacaagaagaatcaagttgatccgagacttgcagccctcgaaaagctcttaaaacaagatgatgaatcttaactctttaaggaggtgggaataatggctgtaccttttagaagaacttctaaaatgaagaaaagattgcgccgtacacatttcaaacttaatgtacctggtatgacagaatgtccgtcatgcggagagatgaagttgtctcaccgtgtatgcaaagcatgcggatcatacaacggcaaagacataaatgtaaaaagtaactaataagaaaagcgcggggtgaaaagccctgcgctttttctttttctcttcctgtcagcttgcggaaaatttgtgagtgcaaatagtctatctaatctattaccggcatatgtatgagataaataagctgacatggagggagattgaatttgaccattacaagacaagatgcttggactcaggatgaggatttgctgctggcagaagtggtgcttcgtcatattcgagagggaggaacacagctttcagcctttgaggaggttggaagggcgctgaccagaaccgcggcagcctgtggtttcaggtggaactcgtatgtgagaaaacaataccagtcaggtatagagcttgcaaaaaagcaaaggaaagaactgagaaagcaaatcggtgttcattcggtcaatatgccgaattccatgaagcagactgcctcggcatcgtcagaaggaaaacgagatttgtccattcaggatgtcattcaatttctcgaacaattcaaagaagcaccgtctgcacaagaatttcagcttgaaagggaaaaattgaaggagcaaatccaatcgctgcaaaaagagcttgaggatttgcggagtgaaaatcagacattgcggaatcagctagagatgacagaagaggattacaaggcactgatcgatatcatggatcgggccagaaaaatggttgtttcgaaggaagacggaagaatgaaaaaagcggctcaagaaacgtaaagaaacgcctgaaatgaaccggccctatagtaagaataggccggttgttttgatttctatgcagactctcccggtgtcatttcatgatccatatcaggatgccagatgagcgggttttcccctttgtcccgcgccatatcatacttaacagttttaaagttcattttgttccaaaattccgctgatttcattctcggatttgtccggatcggcattttgaatgattttgcaaattcaaccaaggctctcccgtatcccctgttctggtagcccggaagaacctcaagcttccacagctccaaataatcctggcggttgtcaaaatagggattcgatttgccgttaacttgatacagactcattcgtgctacaagtttatcgccaaaataaatcccgtaaaaaggcgaagtgctgtcattttcaataatattatcctgaagttcttcaagcattgaaagctcctgaatgccgtattctttgaatttcttgaattcttccagcgttttatagttgataagcagacgttctacctttgtcaaacaaatctccccctttgttgtttctacatatattgtaaacgctttatttaaaaaatccaaatatttaaactttaattttaagcacatgggatctttgagaagtaatttcttcttacttctgctatgataatacgtaaatgctaaattgggtgtgacatcatgaaaattggaattatcggcggaggctccgtcggtcttttatgcgcctattatttgtcactttatcacgacgtgactgttgtgacgaggcggcaagaacaggcggcggccattcagtctgaaggaatccggctttataaaggcggggaggaattcagggctgattgcagtgcggacacgagtatcaattcggactttgacctgcttgtcgtgacagtgaagcagcatcagcttcaatctgttttttcgtcgcttgaacggatcgggaaaacgaatatattatttttgcaaaacggcatggggcatatccacgacctaaaagactggcacgttggccattccatttatgttggaatcgttgagcacggagctgtaagaaaatcggatacagctgttgatcatacaggcctaggtgcgataaaatggagcgcgttcgacgatgctgaaccagactggctgaacatcttgtttcagcataaccattcggattttccgatttattatgagacggattggtaccgtctgctgacgggcaagctgattgtaaatgcgtgtattaatcctttaactgcgttattgcaggtaaaaaatggagaactgctgacaacgccagcttatctggcttttatgaagctggtatttcaggaggcatgccgcattttaaaacttgaaaacgaagaaaaggcttgggagcgggttcaggccgtttgtgggcaaacgaaagagaatcgttcatccatgctggttgacgtcattggaggccggcagacggaagctgacgccattatcggatacttattgaaggaagcaagtcttcaaggtcttgatgcagtccacctagagtttttatatggcagcatcaaagcattggagcgaaatacaaacaaagtcttttgagctttttcggtaacatgctatactcatttcggatcactaactatttattggagaaaggaagttctagaagatgcagctaactgaactttccatcaaaaatcagaatgtgtttgtacagcactatatagatggcaaagaagaaatgtcttcttttttgattacagtattcatcataaggacatgtggcgcgaaagaatggaagacttatcttcccggtttttcgcaagagaggaattggcggcgtacttaacctcttaccataataaattcggttcaagtgcgatgcagtctgccattgagaagctgaaggacccgtcaagtgccgcagtagtcggcggacagcaggcaggacttttaacaggaccgctttacaccatacataaaattatttcaatcattgttttagcaaagcaacaagaaaaggaactgcaagtgcctgtcataccaatcttctgggtggctggagaagaccacgatttggatgagattaattttgttcacacatctgaagagaatggacctgtgaaaaaaaagctgcctcagtcttattggaagaaatcatcagcagcgagtacatcgcttgatcaggaaaagtgtgccgcgtggatagatgatgtttttgccgcttttgaagaaacagaccatacgaatacacttctcgacaatgtgaaacgatgtttaagggaatctgttacgtttactgacttctttgaactgctgattgcggatttgttccaagaagagggcttagttttattaaattctggagatccggggattaaaaagctggaaacggccatgttccaaaagattcttcgagaaaatgatgaactcgcccgcgctgtatcagatcagcaggccttcatgcgtcaagcaggctacaaaccgattatcgagtccggaaaagagcaggcgaatctgttttatgaatacgaagaagagcgttttttaattgaaaaagacaacggccgatttgtcatcaaagagcttgatctaggatggacgagggatgaacttcatacacatatggaagaacatccagagcgtttcagcaacaatgttgtaacgagaccgttaatgcaggaatttctcattccgactttagcatttattgcagggcctggggaaatcaattattggggcgagctcaaacaggcttttgcggtgatgggcttcaaaatgcctcctgtcatgccaaggctgaacattacgatacttgagcggcatattgagaaaaaactggctgaacggaatatctcattacaagacgcgattgagcgcggaacggagaatcaaagagagacatacttcgagcgccagattccggaagagtttacggcggtgatggatcaggcgaaaagccaaattgaagcgattcacaaaacggtccggcaggaggcgttaaaggttgatcaaagcatggaacctttactcctgaaaaatgccgcttttattcaggatcagcttcaattcttagagcgcacggtgacgaagcgaattgaagaaaaagaaggctacgtcttgaaggattatgaaagaattcaaaatagcattaagccgcttcttgcgccgcaagaacggatttggaatatcatgtattatttgaacaggtacggtccaaaattcttcacgacattcaagaatctgccattttcttttcaaaatcaacatcaagttgtcaaactttgaaataaagttttaaagaaccctgaatagttcagggtttttttttatgggtaaacagtgtaaaatgaagttgtggagcgaagtggtgaatagtggtgagttaaggagagaaagtggggcaagagatcatgtttatgggtgaatatcagcataccatcgatgcgaaaggccgcatgatcgtacccgctaaattcagagaaggcctaggtgagcaatttgtgctgactagaggacttgaccaatgtctcttcggctaccctatgcacgaatggaaacaaattgaagaaaaactaaaagctcttcctctcacaaagaaagatgcccgtgcgtttacccgtttcttcttttcaggggcgactgaatgcgaactggacaagcaaggcagggtaaatatcgcatcatctctattgaattacgccaaactggaaaaagaatgtgttgttatcggggtttctaatcgaattgaattgtggagtaaagtaatttgggaacaatacacagaagagcaagaagattcatttgctgaaattgctgaaaacatgattgggtttgatatataatgattcttcgtgtataacactctaaaagcaatttcaattcatcctgataaaaggtgggaccaacacaatatgtttcaacacaagacagtacttcttcgtgaaaccgtagacggactcaatattaagccggacggtacatatgtagactgcacactcggcggagctgggcacagtacatacttattgcagcagttatccgagaaggggcgtttaatcgcttttgaccaagatgatacggcattacagcatgctaaagaagtgttgtccgactataaaggacagctcattctgattaaaagcaatttcaggtatttaaaagaatgtttgaatgaacaaggcattacagaagtagacggtattttatttgatttaggggtgtcctctccgcagctggatacaccggagcgcggattcagttaccatcatgacgcaccgttggacatgaggatggaccagtcggctacgcttacggcgaaagaagtcgttaatgagtggcgctatgaggatctcgtccgtattttctttaaatacggagaagagaagttcagtaaacagatcgccagaaaaattgaggaggcaagaatgaagtctcctattcaaactacgggccaactggtcgatctaataaaagacgcgattcccgctccagcgagaaggagcggcggacatcccgctaaacgcgtgtttcaggcaatcagaattgccgtaaacgatgaacttagggtgtttgaagaagctttggagcaggcaattgaggttctgaagccagggggcagggtatcagtcattaccttccactcgctagaagacagaatttgcaaaaccacttttaaagaaaagtcgtcgcttccagaacttcctccgggacttcctgttataccggaagagtttgaaccggagctgaagctcatcacacgaaaaccgattacggcaactcaagaagagcttgaagagaacaaccgggctcgttctgccaagcttcggattgctgaaaaaagaaaataacgaaacgcgaacgcaaaattaaaaggaggtcatcagcctatgagcaatttagcttaccaaccagagaaacagcagcggcatgcgatcagtcctgagaaaaaagtgattgtcaagaaaagggcttccattactctcggagaaaaagtgcttcttgtcctctttgctgcggcggtgctcagcgtatcgcttttgatcgtatcgaaggcgtatgcggcatatcaaaccaatattgaggtgcaaaagcttgaggagcaaatttcatccgaaaataagcaaattggtgacctcgaaaaaagcgttgctgatttaagcaaaccgcagcgcattatggacattgcgaaaaagaacggcttgaatttaaaagataaaaaagtgaaaaacatacaggaatgattcaaatgccaaaaaagaataaatttatgaatagaggagcagcgattctaagtatttgtttcgctctctttttctttgtcatcctggggagaatggcatatattcaaataaccggaaaagcgaacggcgaagtgcttgcgacaaaagcgacagagcagcatgaaaagaaacggaccatcgaagcgagccgcggctcgattttagaccgaaaaggaaaagtcattgcagaggacacagcgacgtataaactgattgcgattctcgataaaaaaatgaccactgatgtcaagcatcctcagcatgttgtaaacaaagaaaaaacggcagaagcattgtctaaagtgataaacttggacaaggccgacatccttgatatcttaaataaggaggatgcaaaacaagtcgagtttggctcagctggccgggatattacgtattcgcaaaagcaaaaaatcgaaaagctgaaactcccgggcatttcatttttacgggatacaaaacgctattatccaaacggtgtttttgcatccaatttaatcggctatgccgaggttgatcaagacacaaatgaaatttccggcgcgatggggttagaaaaagtgctggataagtatttgaaggagcgggacggatatgtgacatatgaaagcgacaaatccggctgggagctcccgaacagcaaaaataaaattacagcgccaaaaaatggtgacaatgtatatttaaccattgaccagaaaattcaaacctttttggaagacagcatgacaaaagtggcgcaaaagtataatccgaaaaaaatcatggccgcagttgtcgatccgaaaacaggcaaagtccttgccatgggacagcgaccaagctttgatccgaacaagcgggatgtgacaaactactataatgatttgatttcatatgcgtatgaacccggatcaacgatgaagatatttacactcgctgctgcgatgcaggaaaacgtgtttaatgcgaacgaaaaatataaatcaggtacgtttgaagttggcggggaacctgtcagggaccataatagaggtataggctgggggccgacaacctatcatgacggcgtccttagatcgtcaaatgttgcatttgcgaaactggcgaaagaaaagctgggatatgaccgtcttaatcaatatttacacaaattcaatttttatcaaaaaacaggtattgatttgccaggagaagtctctagcaaaatcaactttaaatatgaatttgataaggcgtcaaccgcatacggacaagcgtctgcagtcacaccaattcagcagcttcaggccgcaacggcaattgcgaatgacggcaaaatgatgaaaccttatgtgattgaccatatcgttgatcccgataaagataaaaccatctatcaaaataagccagaatcagccggaaccccaatttctgcaagcacagcgaaaaaggtgcgggatatattgggagaagttgttacgtcgaaaatcggaacagggcaagcctataaaatcgaaggatttgatgttgccgggaaaacaggtactgcgcaaatagccggtaaaggcggatatctagacggaacagatgactatatcttttcgtttatgggtatggcaccaaaagatgatcctgagcttttaatttatgttgctgtacagcagccgcaactcaaagcaggacaaagcagttcagatccggtatcagaaatcttcaacccgacaatgaaaaacagcctgcactacctgaacattgaaccaactgaaaaatctgactcagataaggaagaaacaaaagcgcagacaatgcctgatttaacagatcaaacggtagctgctgctcaaaagaaagcaaaagaggagaatctcacaccaattgtcatcggcagtgatgtcgctgtaaaagaacagtatccgaaagcggatgaggaagttctcaccaatcaaaaggtcttcctgaaaacgggcggcaaaatcaaaatgcctgatatgacaggctggtcgagaagagaggttctgcagtacggcgagctcgcgggaattcatattgaagtaaacgggcaaggctacgctgtcagccaaagtgctaagaaagacaaagaaatcaaagacaaaaccgtaatcaaggttaagtttaaaaatcctgattaaaaagaaagcttgcgttatgcaggctttctttttttatgccttcagaggagcatcgttctacctgtccaatttcaggcataaaatgaaacaagcctaaataaggagtgaacggtctcttgcgcgtctcgaatgtaacggttagaaaacgtttattatttgttttgctttttggcgtgatcgtgtttctgatcattgatacaaggctggggtatgttcagtttgtgatgggcgaaaaactgacttcgctggcgaaagattcctggagccggaacttgccgtttgagccggagagaggcgagatactggatcggaatggtgtgaagctcgcaacaaacaaaagtgcgccgaccgtattcgtcgtgccgcgccaagttcagaatccgatgaaaacgagcaagcagcttgcggcggtgctcaatatgtcagaagaaaaagtatataaacatgtgacaaaaaaagcgtcaatcgaaaagatcactcctgaagggagaaaaatttcaaatgagaaggcgaaggaaattaaagcgcttgatttaaaaggtgtgtatgttgcggaggacagtatccgtcattacccgttcggcagctttttatctcatgtgcttggatttgcaggaattgacaaccaaggactccttggattggaagcctattacgacgatgatttaaaaggggaaaaaggttctgtcaagttttatacagatgccaagggtaaaaaaatgcctgatgaagcggatgactatacgccgcctaaggatgggcttgatatgaagctgacggttgattcaaaggttcagacgataatggaaagagagcttgataacgctgaggccaaatatcatccggacggcatgattgccgtagccatgaatccgaaaaacggagaaattttggggatgtctagcaggcctgacttcgaccctgctgattaccaatctgttgatccgtccgtctacaaccgaaatctgccagtatggagcacgtatgaaccgggatctacctttaaaattattacacttgcagcagcccttgaagagcaaaaagtaaatttgaaacgggatcaattttatgataaagggcatgcggaagtggacggagcgagactgcggtgctggaaaagaggcgggcacgggctgcagacgtatctggaagttgtgcagaactcctgcaacccggggtttgttgaattaggcgagcgcttaggaaaggaaaagcttttcaaatatatcaaagactttggttttggacaaaaaacggggattgatctccaaggcgagggaacaggcatcttattcccgcttgagagagtaggcccggtggagcaagcaactacggctttcggacagggagtatccgtcacgccgattcagcaggttgcagcagtctccgccgctgtaaacggaggaacgctctacacaccttatattgcaaaggaatggatcgatcctgttacgaagaaaacggtcaaaaaacaatcaccaatcgcaaagaaacaagtcatttctgaggaaacatccaaacaaatccgctatgctctagaaagcgtcgtcgcagaaggaaccggccgcaatgcatttgtagaaggatatcgtgtcggaggaaaaacgggaactgcacaaaaggttaaagatggaaaataccttgaaaacaaccatattgtatcatttatcggtttcgcgccagctgatgatccgagtctagtcgtctacgttgcggtggataacccgaaaggcacgattcaatttgggggaacggttgcagcgcctattgtcggaaatattatgagagacagtctgccggaacttggtgtgaagccccggaaaaatcaaatcgagaaaaaataccaatggaacgacacaaaaacaatagaagttccgaatgttgtagggatgtctgtctcagatcttgagtcactattggtgaatctcaatgtggatgcttccgggaaagggagcaaaatcgttaaacaatcgccagctgccggaacgaaagtaaaagaaggctcaaagatacgcgtgtatttgactgaagaagatgaaaaggaggcagccgattgattcgggctgcctattcttttattgcagaaaaaatgctgatatctttcaagattagctggatgtatccttttatttacgctaaaatatgaactgtatgcttaaaatcattaccacatcatttgatgtgacttcaatgataaaaagaacgaattagaatgttgagaggtttgatacgatgaaacttacaaagctgcttacatacttaacaaccgaaccttctgtaaacgactcacaagaccctgaaataacttcaattgagatggactccagggaagtaaagaaagggagtctttttgtatgtgtaaaagggtatacggtggatggccacgattttgcgcaaaaagcagtagaaaacggtgcagcggctattgtggcagaaagagaggtcgatgtgaatgttcctgttattattgtccggcagtcacttcgcgcgctcagcgttttgtctgatgcgttttacggacagccgacgaagaagcttcagctgattgggataacagggacaaacggcaaaacatcaacgacccacatggtcgatgagattctgaaaaaagcgggaaaacgcacaggcttgatcggtacaatgtacatgaaaatcggagacgaaacacttcctgttaaaaacacgactccggaaagcgtcacgctgcagaaaacgtttaagaaaatgaatgacaagcatgttgacactgcaatcatggaggtttcttcccacgctttgtctttaggacgcgtccatggctgtgattatgatattgccgtgtttacgaatttaacacaggaccatctggactatcataaaacgatggatgagtaccggcatgcaaaaagcttgctcttttcccagcttggcggggctttcaaccatgaacatccaaagcgtgccgtcctgaatgctgacgatgaggcgagcgcttattttgaaaaggtaacagctgcgcatatctctacatacggaattaaaaacgatgctgatgtgatggcgaagaacatcagtatcactgcacagggcacaagctttgatctcgtgacaaacaaaggcacgaagcacatcacgatgtctctcgtcggacaatttaatgtgtataacgtgctggccgctgttgcgacatgtattgcagcaggcataccgtttgaaatcatcactgaagctgttgaagaattgcatggtgtaagaggccgttttgaattggtcaatcagcagcaggagtttccagtcattgtagactacgcgcacacaccggacagccttgaaaatgtgctggagacatgcagagacatgacggaaggaaagctatttgtcgttgtcggctgcggaggagacagagataagacgaagcgcccgaaaatggctaaaattgctgtggagctggctgacgagccgattttcacgtcagataacccgagaagcgaagatcctcgcgcgattttaagagatatggaagccggagtagagaacgcatactatcacagtattgcaaaccgcgagcaggcgatctttttcgcaattgccaatgccaaaaaaggcgacgttgtcctcattgcgggaaaaggacatgaaacctatcagcagatcggaaatgaaactttcgattttgatgatgctgaagtagcggcgagagccattgttgaactcaataagaataagacgaattcataggaaagagatgttactgaataatggagcttgaaaagatttttcatatggaaaaaaatcatgaatatgataactacgtatgtcgtttgaaagaaacaggaggagaaaaggacaatgcttgagcaagtcattctgtttacaattttaatggggtttttaattagtgttctgctctctccgattcttattccgtttttaagaagattaaaattcggccagagtattagagaagaaggaccgaaatcacatcagaaaaaatcagggacaccgacaatgggcggggtcatgatcatactttctatcatagtgacaacaattgttatgacacagaagttttcagaaataagccccgaaatggtgctgcttctgtttgttacgctaggctacggtttgcttggctttttagatgattacatcaaggttgtcatgaagcgcaatcttggattgacatcaaagcaaaagctgatcggacaaattattattgcagttgtattttacgccgtgtatcattactacaattttgcgacggatattcgcattcctggaactgacttatcatttgatcttggctgggcttactttatccttgtgctctttatgcttgtcggcggatcaaacgcagttaacctgactgacggccttgacgggttattgtccggtactgcggcgattgcctttggcgcctttgccattctggcatggaatcagtctcaatatgacgtagcgattttctcagttgccgttgtcggtgcagttctgggcttccttgtatttaatgctcatccggccaaagtttttatgggagatacgggatcgcttgcattgggaggagccatcgttaccattgccattttaacgaaattagagatcctgctggttatcatcggcggtgtattcgttatcgagacattatctgttattttgcaggtcatcagctttaaaacgacaggtaaacgaatctttaaaatgagtccgcttcatcaccattatgagcttgtcggctggtctgaatggagagtagtcgtgacgttttgggctgcgggacttttgcttgccgttttaggaatttacatcgaggtgtggttataagtggaaaatgatcaatttttacagaaacagcattttttaatccttgggcttgcgaaaagcggatatgcggcggcctccattcttcatgaaaaaggcatttatgttgcagtcaatgaccaaaagccttttgaagaaaatgaaccggcacaaaagctttctgaaaaaggaatcgaagttgtttgcggagagcatccagtttctctgttcgatcagcatcaaatcacgattctgatcaaaaacccgggaattccttatgaaaatattatggttcaggaagcggagaaacgaggcattccggtttggacggaaattgagctcgcttactacctgaccagcgccaagtttatcgggattaccggatcgaacggtaaaacgaccacgacaacgctaatttacgaaatgctcaaagctgactcgcaaaaagcactgattgccggaaacatcggcacagtcgcaagtgaggttgcctatcatgctgatggagatgaatggatcgttaccgaactgtcttcgtttcagctgatgggaacacacgctttcagaccggaaatcagcctgattttaaatgtatttgacgcccatctggattatcaccatacgcgcgaaaactatgaaaaagcgaaacagaaagtgtaccttcatcagactgcttcagataaagccattgtcaaccaggatgatgaaaccgtcgtgcgtcttgctgaagccggaaaagccgaaatcgtcccgttttcagtcagcaaaacgcttgaacagggcgcatatgtaaaagacagtatgattatgtttaacggcgaagccattcttcctctggaagaggttgtactgcccggtgctcataacctggagaacattttagcagctattgcagttgtgaaaacggcaggagcatccaatgaggcggttaaaaaggtgctgacaagctttactggtgtgaagcaccgcctccaatatgtcacaactgtgaatggccgcaaattttataacgacagtaaagcaacaaacattctggcgacaagcaaggcgctttcagcttttgacaagccggtcattctgcttgcgggcggactggatcgcggaaatggttttgatgacttgaaaccttatatgaagcatgtcaaagcagtgcttacatttggccagacggcgccaaaactcgagaaactcggcaatgaactgggaatacaacatgtcaaacgtgtcgataatgttgaacaagcagtatctgcggcgtttgcgctctcaaatgaaggagatgtcatcctgctgtcacccgcgtgtgcgagctgggatcaattcaaaacatttgaagaacgcggtgacatgtttatagatgccgtgcatatgcttaagtaagggcttgtcttgaagtaaatcggcagccctaatgactttaagcttggggtgtcgattgctttgactactaaaaaaacatcgcctgatttgttattggtcatcattacgttattattattaacaatcggattaattatggtgtacagtgcgagtgcggtatgggcggattataaatttgacgactcattctttttcgcgaaacggcagcttttgtttgcgggaatcggcgtcattgctatgttttttatcatgaatgtcgattattggacttggaggacatggtccaaattgctgatggttatctgctttttccttctggtgcttgttttgataccgggcgtcggaatggtgcggaacggttcaagaagctggatcggagtcggagcattcagcatacagccttcagagtttatgaagcttgcgatgattgcattccttgctaaatttctctctgaaaaacaaaaaaacatcacatcgttcagacgggggttcgtccctgcacttggcatcgtgttttcagcatttttgattatcatgtgccagcctgacctcggaacggggacagtaatggtcggaacttgtattgtcatgatttttgtagccggcgcgcggatcgcccatttcgtctttctcggactgatcggcctcagcggatttgtcgggctcgtactatcagctccatatcggattaagcggattacctcatacttaaatccatgggaagacccgctcggaagcggatttcagatcattcaatcgctttatgcagtggggcccggtgggttgttcggaatggggctcggacaaagcagacagaagttcttttatctgcctgagccgcaaacagactttattttcgccatcttgtcagaggagctgggctttatcgggggaacacttattttgctcctcttcagtgtcctgctgtggagaggaatcagaattgcgcttggtgcgcctgatctgtacggaagctttgtcgcagtcggcattatttcaatgattgccattcaagtcatgatcaatatcggcgtagtcacgggcctgattcctgtaacaggcatcacgctcccgtttctgagctacggaggctcttcattgactctaatgctgatggcagttggtgtgctgctgaatgtaagccgctactcgaggtattaacgaatgtatgtccatgcttcctgtctaacatgaagcttggaaacaattgatgcgataaccctgtccaacaaaacagggttatcgttatgttatagagaaacttagactgggggaaaagaaatgcgaattgcaataagcggaggcggtacagggggacatatttatcctgcgcttgcttttattaaagaagtgcaaagacgtcatcctaatgtggaatttttatatatcggaacagaaaacgggctggagaaaaaaattgttgagcgggagaatataccgtttcgttcaattgaaattacaggatttaaaagaaaattgtcatttgaaaatgtcaagactgtgatgcgttttctgaagggcgtcaaaaagagtaaatcgtatttagcggaatttaagcccgatgccgtaattggaacgggcggttatgtatgcgggccggttgtctatgccgctgcgaaaatgggaattccgactattgtccatgaacaaaacagcctgccgggcatcacgaataagtttctttcaaaatatgttaataaagtagcgatttgttttgaagaagcgaaatcacattttcctagcgagaaagttgtatttacgggaaacccgagagcctctgaagtcgtctcaataaagacgggacgatcaatggctgaatttgggctttctgaagacaaaaaaacggtcttaattttcggcggaagccgaggcgctgcaccgattaaccgcgctgtcattgacatgcaggatgcgctgaaaacaagagactatcaagtgctgtatatcaccggtgaagttcactatgaaaaagtaatgaatgagctgaaaagcaagggtgccgctgataatatggtcacaaagccgtttcttcatcaaatgcctgagtatttaaaggccattgatgtcattgtggccagagccggtgcgacaacgattgccgaaattactgctctcggaatcccaagtgttctgatcccaagtccatatgtgacagcgaatcaccaggaggtcaatgcgagatctcttggccagcataatgcggcgattgtactgaaagaaacagagctcagcggggagaagctgattgaagcgctagaccggattgtactgaatgagcaaacgttaaaggaaatgagcgaacgaacaaagtcactcggtgttcctgacgcggctgcccgtttatacagcgtactcgaggaattaaaaaaatagtagaaaagcaaatggaatgcggaggtttacgatggagaaagtgatacaggaattaaaagaacgcgaagtcggcaaggttcttgcaaatgaaccgctcgcgaatcatacaacgatgaaaatcggcggacctgcggatgtattggtcattccaagcagtatagatgctgttaaagacatcatggacgtgattaaaaaatatgatgtgaagtggacagtcatcggccgcggatcaaatcttcttgttttagatgaaggaattagaggcgtagtgatcaagctgggggcgggtcttgaccatttggagcttgaaggggaacaagtaacagtcggaggcggttattcagtggtccgccttgctacatcattgagcaaaaaaggcctgtccggtttggaatttgctgccggcattccaggatcagtcggcggagcggtttatatgaatgccggcgctcacggttctgatatgagcgagatcctcgtcaaagcgcatattttgtttgaagacggaacgattgagtggctgacaaatgagcagatggatttcagctacaggacatctgtactgcaaaagaaacgcccgggcgtttgccttgaagctgttttgcagctggagcagaaggataaggaatcaatcgttcagcaaatgcaaagcaataaagactatagaaaaaatacacagccgtattcaagcccttgtgcgggaagcatattcagaaatccgcttccgaatcatgccgggaaccttgtagaaaaagcaggcttgaaaggatatcaaatcggcggtgcaaagatatcggagatgcacggaaacttcatcgtcaatgcgggaggagcatcagcaaaagatgtgcttgatctcattgaccatgtgaaaaagacaatccgtgaaaaatacgagattgatatgcacacagaggttgaaatcatcggcggaaatcgctgattcaagttctgactgaagctgttcatatgatatactgtaagcaaacgacaaacggcatcatagtatgccgtttgttttggaatagacagacttttaacagctgtttcatttgaatgaggtgaacaggcaatgaacccgggtcaagaccgagaaaaaatcgttaacattgaagagcggatccctaaaattaaagagcagaggaaacaaaaggcaaaccgccgtctcatttcatttattatgctcttttttattatggtgctgatcattgtgtacctgcaaacaccaatcagtaaagtatcaacaatctctgttacagggaatgaaaatgtatcaaaaaaggaaattatcgacctttccgatattaacagcggagatactgagttttggagtttggacaagcaaaaaacagaaaagaagattcagcaaaataaattagtgaaaaaagcggagatcagcaaatcgcttcctaataaaatcaacattgcaatcgaagaatataaagcgattgcttatttagaaaaagacgatgtgtactatgaagtgcttgaaaacggctcagttctgccaaacgaagtaacgccggatgatgccggaccgattttagtgaattggacaaacgcgaagaagcggtctcaaatggccaagcagctcgatgcgttgtcaaattcgttaaaacagtcgatttcagagatttattatacgcctgtaaaaatggatgaaaaccgtattaagttgtacatgaacgacggttatgttgtcactgcatctattaaaacgtttgcagaccgaatgaagacgtatccttctatcatttctcagctaagcagcaataaaaaaggaatcattcatttagaagttgccacctattttgaagagtttgggaaaaacgataaggctgctaaaaaggaagatgaaaattgaggggcaaatcagcagtccttctttccttgattatgcttatcgcaggctttttgatttcattttcttttcaaatgacaaaagaaaacaacaaaagcgcggctgagacggaagagtggaaaaaagaatatgcgctgagagatgaacttctgaaacaagagaaagaaaataagaagcttgaaaaagaattatatcaaaagcaaaacaaagtccgccaggcggaaaataagctgaagaaagagaagtcggaatactataatgtcctcgaagatacagaaaaatacaggatgtatattggggaagtcggtgtgcagggagaaggcgttgaggtgacattggaagatgcgtcatacataccggaaggggagaatgtgaatagttacatcgttcacgaaagccatatcttccaagtagtaaacgaaatgtatatctcaggagcggcagctgtcgccgttaatggacagcgtttgacgcatgattcgtatatcaaatgcaatggtcctgtggtaacggtagacggggtgcagcatcccgctccatttacggtatccgctattggagatccagatgtcctgctgccctcgttaaatatcgctggaggcctaattgatcagctgtcaatggatcatatttctgtgtcggcagaaaaagagaaaaacgtacaaatgaaaccgattctgaaaacgaaggaatgactgaaaaagcgggtgaaatagattgaaaataaagcgttccttcataagcatcagtgtgcttatggtcatcttcggcctgatgatatctgttcagtttaattcgttaaagcaccccaaagtccgggatacaagagatatgtgggatattagggaagagctgacatcagagcagaagaagcaggaaaagctgctgtctgaaataaacaaatatgacaaacttctgaatagctattcgcaaacgaaagaaatgacaaaagaaaccgcgctaaataataccttgcaatccttaaaaaaaacagccggcatgaccgatataacaggtagcggaattgtcattacgatttccccgcttttttctgaaagcttaacaggagagccggtcgaaaatccgcctccggatttgctgaaaaagctgattaatgaactcaactcctacggtgcagagcatatctcgattaacgagcgaagagttgtgaatcatacagttatcagagatataaacggcactacaaaaatagacggatacgcccttgacgattatcctttaacagtaaaagtgcttgccaaagatccggacatgttacacagcggagtgaaggggtcaggccttgaggatctttttgcatctgaaaatttagcattaaaagccggtaaatctgaaagcaaactaacattaaaagcatatgacagaccactggacgtacaacagctgaaactgcttaaagactgaaaaggaggagaattgtcatgtggctgcccgtgttgggactggtgctcggaatagcgattggactaatgacaaacttaacgataccgagtgaatactcaaactatttatcgcttgcggtgcttgccgcacttgatacattaatcggcggaatcagagcgcatttacaaggtacatatgatgaaatggtatttgtttccggtttcttttttaatattatattggcaataagtttagcttttctgggagtccatcttggtgtagacttgtatttagcaggtatattcgcatttggagtcagattatttcagaatatagccgttatcagaagaaatctactaacaaagtggactctttctaaaaaaaataaaaaaaatgtgatataaaagaggatatacataggatataacgaatattttcaataaacataaaatgtgaaaagcacataaaaatattctgttgttattttttgttacacacttgtaaagccacattcattgtattgttgttccgcaaataatagaatagaaatgatcgaaatgtgaggaggtgccatagaatgaacaacaatgaactttacgtcagtcttgacatcggtacgtccaatacaaaagtgatcgtcggagaaatgacagatgattcccttaatattatcggtgtgggaaatgtaccgtctgaagggttgaaaaaaggctcaatcgttgatatagatgagaccgttcattctataagaaaagcgtttgaccaagctgaaagaatggtaggttttccgcttagaaaagctattgtcggcgttaatggaaattatatcaatattcaagatacaaacggtgttgtagcagtttccagtgaaaataaagaaattcaggttgaagatgtacgccgtgtcatggaggcggcacaggttgtttcagtaccgcacgaacagctgattgttgacgtcattcctaaacagtttatcgtagatggaagagatgaaatcaccgacccgaaaaaaatgctgggtgtgcgtttagaagtagagggcaccttgatcaccggttcaaaaacaatcttacataacttactccgctgcgttgaaagagctggtattgaaataactgatatttgccttcagccgctggcagccggttctgctgcattatcaaaggacgagaaaaaccttggtgtggctctcattgatatagggggagggtcaacaaccattgccgtattccagaacggacatctcacttctacccgtgtcattcctctcggaggcgaaaatatcaccaaagatatctccatcggattgagaacgtcaacagaagaagcagaacgcgtgaaaaagcaatttggacatgcctactatgacgaagcctcggaagatgaaatatttgaggtaaccgttataggcaccaatcaaaaacaaacatttacacagcaagaagcagcgaatatcattgaagcgagagtagaagaaattcttgaaattgtttcagaagagcttcgcagtatgggaattaccgatctgccgggaggcttcgtgctgacaggaggacaagcagctatgccgggtgtcatgtctttggcgcaggatgtgctgcaaaacaatgtcagagtggcaagcccgaattatatcggtgtaagagatcctcaatatatgacgggagtgggcctgatccaattcgcctgccggaatgcaagaatccaaggcagaaaaataggctttaagatgcctgaagaagcgatacaggaaatcgcagtctcatcatctgaggaacaagagcagcatcatcaccaaaatgaggtgcagcagcggccaaaaggaaaacaaaaaacacaagccgaacataataaacagagcaaaatgaaaaaactattaagcatgttttgggaatagatagatagtcattcggcagattaggaggatttagcatgttggagttcgaaacaaacatagacggcttagcatcaattaaagtaatcggagtaggaggcggtggtaacaacgccgttaaccgaatgattgaaaatgaagtgcaaggagtagagtatatcgcggtaaacacggacgctcaagctcttaacctgtcaaaagcagaagtgaaaatgcaaatcggcgcaaagctgactagaggattgggagcaggtgcgaatccggaagttgggaaaaaagccgctgaagaaagcaaagagcagattgaagaagcacttaaaggtgctgacatggtattcgtgacagctggtatgggcggcggaacaggaacaggtgccgcaccggttatcgcacaaatcgcgaaagacttaggcgcattaactgtcggcgttgtgacaagaccgtttaccttcgaaggacgcaaaagacagcttcaggctgcaggcggaatctcggcaatgaaagaagcggtggatacactgatcgtgatcccgaacgaccgtatccttgaaattgttgataaaaacacaccgatgcttgaagcattccgtgaagcggataacgtacttcgccaaggggttcaaggtatttctgacttgattgctacacctggtcttatcaaccttgactttgctgatgtgaaaacaatcatgtcaaacaaaggatctgctttgatgggtatcggtattgctactggggaaaatcgcgcggcagaggcagcaaaaaaagcaatttccagcccgcttcttgaagcggccattgacggtgcgcaaggtgtcctcatgaacatcactgggggaactaacctcagcctatatgaggttcaggaagcagcagacattgtcgcttcggcatctgatcaagacgtaaacatgattttcggttctgttattaatgaaaatctaaaagatgagattgtggtgacagtgattgcaaccggctttatcgaacaagagaaggacgtgacgaagcctcagcgtccaagcttaaatcaaagcatcaaaacacacaaccaaagtgttccgaagcgtgagccaaaacgtgaggagcctcagcagcagaatacagtaagccgtcatacttcacagccggctgatgatacgcttgacatcccgacattcttaagaaaccgtaataaacgcggctaatgtaaaggacaaaatcgttttcgattttgtccttttttgtttttctcttcacactttccttcttataaagtctttttccctattgcttccttcgcttagtaacaaaacagataattagacctatttatttttgtgacatttctatcattttcatatatatggaaattgaatgacatgaaacgacaatatctgtaattcagattgtctacagttaatatacagcgatgttctgacaaaccattcattattaaaaggagggacgacactttttttaaaaagcatgttgaaaaagggggatgaaaatgaagaaaaaaacgaaaaacagactcatcagctctgttttaagtacagttgtcatcagttcactgctgtttccgggagcagccggggcaagcagtaaagtcacctcaccttctgttaaaaaggagcttcaatctgcggaatccattcaaaacaagatttcgagttcattaaagaaaagctttaaaaagaaagaaaaaacgacttttctgattaaatttaaagatcaggctaacacagaaaaagcggcaaaagcggctgttaaaaaagcgaaatcgaagaagctgtctgccgctaagacggaatatcaaaagcgttctgctgttgtgtcatctttaaaagtcacagccgatgaatcccagcaagatgtcctaaaatatttgaacgcccagaaagataaaggaaatgcagaccaaattcattcttattatgtggtgaacgggattgctgttcatgcctcaaaagaggttatggaaaaagtggcgcagtttcccgaagtggaaaaggtgcttcctaatgagaaacggcagctttttaagtcatcctccccatttaatatgaaaaaagcacagaaagctattaaagcaactgacggtgtggaatggaatgtagaccaaatcgatgctccaaaagcttgggcacttggatatgatggaactggcacggttgttgcgtccattgataccggggtggaatggaatcatccggcattaaaagagaaatatcgcggatataatccggaaaatcctaatgagcctgaaaatgaaatgaactggtatgatgccgtagcaggcgaggcaagcccttatgatgatttggctcatggaacccatgtgacaggcacgatggtgggctctgaacctgatggaacaaatcaaatcggtgtagcgcctggcgcaaaatggattgctgttaaagcgttctctgaagatggcggcactgatgctgacattttggaagctggtgaatgggttttagcaccaaaggacgcggaaggaaatccccacccggaaatggctcctgatgttgtcaataactcatggggagggggctctggacttgatgaatggtacagagacatggtcaacgcctggcgtgcggccgatattttccctgagttttcagcggggaatacggatctctttattcccggcgggcctggttctatcgcaaatccggcaaactatccagaatcgtttgcaactggagcgactgatatcaataaaaagctcgctgacttttctcttcaagggccatctccatatgatgagataaagccggaaatatctgcaccgggcgttaatattcgttcatccgttcccggtcagacatatgaggatggttgggacggcacatcaatggcagggccgcatgtatccgctgttgctgcactgctgaaacaggcgaatgcctcactttctgttgatgagatggaggatatattaaccagcacggctgaaccgctcacggattcaacatttcctgattcaccgaataacggatatggccatggtctggtgaatgcttttgatgctgtatccgctgttacagatggtttagggaaagcggaaggacaagtttctgtagagggggatgaccaagagcctcctgtctatcagcatgagaaagtaactgaagcttatgaaggtggtagcctgccactgactttgacagctgaagacaatgtgagtgtgacatctgtaaagctgtcctacaagcttgatcaaggtgaatggacagaaataacggctaaacgaatcagcggtgatcatctaaaaggaacgtatcaggcagagatcccagatataaaaggaactaaactaagctataagtggatgattcacgattttggcggtcatgtcgtttcgtctgacgtatacgatgtaacagtgaaaccaagcatcacggcgggatataagcaggactttgaaactgcacccggcggctgggttgcgagcggaacaaataataactgggaatggggagttccgtcaactggcccaaatacagcagcatccggagaaaaagtatatggaacgaatttgacaggaaattatgccaactcagcaaacatgaaccttgttatgcctcctattaaagcacctgattcaggaagtctgttccttcaatttaaaagctggcacaatttagaggatgattttgattacggctacgtttttgttcttccggaaggtgaaaagaattgggagcaggctggtgtctataacggaaagacatcaagctggacggacgaagaaattgatttatcggcttataaaggccaaaacattcaagtgatgtttaaccttcaatctgatgaaagcattgcaaaagagggctggtatattgatgatgtagtgctttctgacaaatcagccggaaaaacagtcaaaaagaataagctgggcgtcgaaaagccgtctggaaagcaaaagaaaaagccagtaaatccgaaaaaggctaagccatctgcaaacacagcggtaaaacatcagaacaaggctatacagcctcaagttttgccgctcagggcacaagtcagtgtagtggaaacaggaaaatcaacatattcagatcaatccacagggcagtacacgctgaagcacaaagcgggagactatacgcttatggcagaagcatatggttatcagtcgaaaacacaaaaagtatctttaaagacggatcagacgacacaagctaattttacgttagaagagatgaagaagggcacattaaaaggcatggtcatcaataaaacgacaggagagccggtaacaggcgcttccgtttatgttgtagaggatgctgctgtggaaccggctatgacaaacgacaaaggtgaatatacgctggaggcctatgaaggcgcttatacgattaaagtcgctgcaccgggttattacagtgatgaattttccgttgagttaaaaggtgatgttacaaaagaaactgcattgaagcctttcgtcggttatccgggtgaaattgcatatgatgacggaacagcggagaatgccaattcctattttgctgccggtaacggatgggcggtaaaaatgacgctcgctgacggcaaggacaaaggcatgcttacaggagggctgttcagattctgggatacagagttcccagatccgggcggcacagagtttaaggttgaggtatacgatgccacaggaaaagacggagcaccgggcaagaaaattgcagggccatttaacgctgaagctcttcgcaatggcgagtggactaaggtagatctcagttcaaaagggattatggtcgatagagacttttatctcgtatatatccagtcaaaacctgacccgtattcacctggactggcaatggatgaaaccggcaagaattccggccgcaactggcagtatataggtggacaatgggagccgggtgacgaagcagacggcaactatatgattcgcgcattagttaattatgaagctgctgtacctgagattacttcaccgacagacaaatcatacacaaataaggatagcgtcactgtaaaaggaaacgcttctcctggcacaacggtacacatttataatggagagaaagaagcaggagaaacgaaagctgctgcggatggcacgttccatgcaggcatcatactcaacaagggtgaaaatgagctgacggcaactgcatcaactgacaacggaacaacagatgcctccagcccaatcacggtcacgcttgatcaagaaaagcctgaattaacactggacaatccaaaggatggcgggaaaacaaataaagaaacgctgactgtcaaaggggctgtatccgatgacaatctgaaagacgtcaaggtgaatggcaaaaaagcaacagtagctgatggttcatactcagcccgtattcttttggaaaatggaagaaatgaaatcaaggtaattgctacagacttggcaggcaacaaaacgacgaaaaagacagtcattgatgtgaactttgacaagcctgtcatttccggcttaattccgggagaggataaaaacttaaaagccggtgaatctgtgaaaatcgctttctcaagcgctgaggatttagatgcaacgtttaccattcgtatgccgctgacgaatgcaagagcgagtgtgcaaaatgccaccgaactcccgttaagagaaatctctccggggagatatgaaggctattggactgccacttcttctattaaagcaaaaggagcaaaagtagaagtgatcgtccgagatgattatggaaatgaaacaagaaaaactgcgaatggaaaacttaatatcaacacagaaaattaagtggaaaaaagctgccgtcattggcagtttttttatatcctctcattatacttcctcgacaaattaagcagatttccctgaaaaattgtattttcctctcaacattaattgacagactttcccacagagcttgctttatacttatgaagcaagaaggggaacagcgtgaggcaagaaagaaaggagtcagatgtgaaaatctatttagatgtcatttggctgttaaacttttgttttgatgcacttttgcttttgctcacggcatttattttaaaacggcatgtaaaaaaaagaagactggtaggcggagcgttcatcggttccagtattgtccttttgatgtttactcctttttcgccgattgttgaacatccggctgggaagctagctttttcagttgtgattgtggtggtgacatttggctttaaaagatttcggtttttctttcaaaatttgttttccttttattttgccacttttttaatggggggaggaattatcggagcccattctttgctgcagtcaaattctattgttcaaaacggtgttatgattaccaatcaaacagggtttggagacccgatcagctggttgtttattgttggtggctttccagcattatggtttttttctaaaagaagaattgaagatattgaaacaaaaaacattcaatatgaggaacgagtcagcgtgcaggcagatttgggcagccaaacacttcatgtcagaggcctgattgattccggtaatcagctgtacgatcctcttacaaaaacaccggtaatgatcatttacattgataaattggagccgattttcggaacagccgaaacgatgatcattcgaaacacagacccattggaagccatcgaacagctcgatgattcctttcgctttttagataaaatgaggttgattccatacaggggagttggtcagcaaaatcaatttttattatgcgttaaaccggatcacgtaacgattatgacaaaagaagaaatgatttctgcagataaatgtttaatcggcatcagcacaacaaagctgtcggcagatggagagtttgacgcgattattcatccgaaaatgctttcgggcaaggctgtcaaacacgtttcataatgttcgcaaatgtccgttacttatcatactcaaacggcgtgacatttagaagggagaggaagatgaaaaaactgaaattacggttgacgcacctctggtataagctgctgatgaaacttgggctgaaaagtgatgaagtctattacataggcgggagtgaagccctgccgcctccattatctaaagatgaggagcaggttttgttaatgaagctcccaaacggcgatcaggcggcgcgcgccattctaattgaacgcaatttgcgtctggtcgtatatatcgcccgtaaatttgaaaatacgggaattaatatagaggatttaatcagcatcggtaccatcggtctaatcaaagctgtgaatacattcaatccagaaaagaaaatcaagcttgctacctatgcctcccggtgtatagaaaatgaaatcctgatgtatttaagaagaaataacaaaatccgttcagaggtttcctttgatgaaccgcttaatattgattgggacggcaatgagcttttgctttctgatgtgctcggcactgacgatgacatcatcactaaagacatagaagctaacgtcgataaaaagcttttgaaaaaggcgcttgaacagcttaatgagagagaaaagcaaatcatggagctgcggtttgggcttgtcggtgaagaagaaaaaacccaaaaggatgtagcggatatgatggggatttctcagtcttatatttcgcggcttgagaaaagaattataaaaagattgagaaaagagttcaacaaaatggtgtaaaaaattttatggttagaaccccttgattttacagggatttcctgatttcgacagtttttcggtctgagtgcagtgcatatttttcccacccaaggagatacttaacgttgtacagcagctcctgtagggagggaaaaaagtgtcgagaaataaagtcgaaatctgcggggtggatacctccaaattaccagtactcaagaatgaagagatgagaaagctgtttaggcagctgcaggatgaaggcgatgattcagcaagagaaaagcttgtaaacgggaacttgcgtcttgtcttaagtgtcattcaacgatttaataacagaggggagtatgttgatgacttatttcaagtcggctgcatcggactaatgaaatccattgataattttgacctaagccacaatgttaagttttcaacatacgctgtacctatgattatcggagagatccgcaggtatttacgcgataataacccgatccgtgtctcaagatcactccgggacatcgcttacaaggcgcttcaggtaagagagcggttaatcagtgagacaagcaaggagccgactgcagaagacatcgcaaaagttcttgaagtaccgcatgaggaaattgtatttgcgcttgatgccatccaggatccggtttctctatttgaaccgatctataacgacggcggagacccgatctatgtgatggaccaaatcagtgatgagcgtaatacagattcacaatggattgaagagctggctttaaaagagggcatgagaaggctgaacgatagggaaaaaatgattttgagaaagcgattcttccaagggaaaacccaaatggaagtcgccgaggaaatcggaatttctcaagcgcaggtgtccagacttgaaaaagcggctatcaaacaaatgaataaaaatattcatcaataatgaaaagcctttaaaacgatgttgttttaaaggcttttctattgattatggatggtttacgttttggaaaaagtaaggtatcctagttcgtacaaagttttatgaaaattaaaacaattataaaaggcaataaagaggaggaccacgatgattttgcagcttgacaatgtctcactaaaacggaatgggaaatggatactgagagatattgattggaaggtggaagaaaaggaaaattgggtgctttacggcctaaatggcgccgggaagacagcgctgttaaatatgctttgctcatattattttccaacatcaggcgagatgcaggtgcttggccatgaatttggcaaaacagagcttggggaaaagctcagacgtaaaattggcctcgtctcagctgctcttcagcaaaaattgtacccggcagattcagcctttgaaattactttgagcggagcttacgcttcgattggtttatatgaaacgccaagtaaggaaaccagggaaaaagcgattggtttgttagaggacttgggagcaattgaatatgccgatcgccgctatgaaaccctttctcaaggggaaaaacaaagagcgttgattgctagagcactaatggccgatccggagttgctgatactggatgaaccagtcacagggctggattttattgcccgggaaaagctgttagatacgattacatacattgcaaacaaagaaaatgcaccatctatcctttatgtgactcatcatgctgaagaaattttgcctgtctttgataaagcccttttattaaaacagggagaggtctttggatccggagaaataaaggaaatgcttactgatcaaatactttccgctttttttgataccccaatccatgtattatggaatcaggatcggccgtttttaacaagagctgagccgataacgaatgcctgacaaacatatatagattcatcctaggggtgctttgcgaagctgagagagactttgtctcaacccttttgacctgatctggatcatgccagcggagggaagcggtgaaaagcggagtacatcggactccgtttgtttttattaagccgtttcatcacatttgaaacggcttttttgattttaaagaataggagcggatttacattggatcaacaaatagactctttgcaaaaaaaagtggaagaacataaggaggagcttattcagcttgcgaaaacgctgatttcttatcaaacacctgctccgcctgcaagaaatacagagggcattcagtcatggattgcgggatatttaaatgaattgggattctcgatcgacaaatgggatgtgtaccctggagatcccaatgttgtagggaagctaaaaggaacagattcagcagattattatagcctgattatcaatggccatgtagatgtggcagaggtaaaagaggatgaagaatgggagcatgatccatttcatccaattgaaaaaaacggtctcttaatcggtcgaggcgcttccgatatgaagggcggaatggcgtgtgtgttgtttgctgtcaaattaattcgtgaagccggcattgagcttccaggtgatctgattctgcaatcggttattggggaggaagttggagaggccggcacacttgaatgctgcaagaggggctaccacgctgattttgcaattgtcgcggatacgagcgatatgcatattcaaggccaaggcggtgtcattacaggctggatcgaaatcaaaagcagtcaaacatttcatgatggaacgagacggaatatgattcacgcaggcggaggaacattcggagcaagcgcaattgaaaaaatggcgaaaatcattgcggggctcggtgaacttgagcgccactggtccattatgaaaagttatcccggttttaaaccaggcacaaatacgattaatccggcagttatagaaggcggcagacatgcggcttttatagcggacgaatgccggctgtggatcacagtccatttttatccaaatgaaacccatgaccaagtggcagcggaaatagaagattacgtcaatcggctgagtgacagtgatatttggcttagggaaaaccgccctgtattcaagtggggaggctcatctatgatagaagacagaggagaaatttttccggcattggaagttgactctggccacccaggcgtcttagcgctaactgcctctcatcagaaagtgaaacgggagtgtccaattattgacgtttctcaatcagttacagatggcggatggctgtatgatgccggtattccatgcgtaatatacggtcctggagatctgcacaatgcacactctgtgaacgagaaggtatcgattgagcagctagtagagtatacaaaaattatactcgattttatcatcagctggtgcagccggaaaaaagaacaatgacatgaaaatttcttcttgctgacaaggttcagcctgcccgttcatatacttgaacaaaaggacggaaaaaggacgtgatggaatgatcagcatttcagaatttcaggtaaaggatgtcgtcaatgtctcaaacggaaaaaagctggggagtattggtgatattgatatcaatgtgaccactggaaaaattcaggcgatcatactcggaggaaatgggaaagttctcggattttttggaaaagaagaggaattggtcattccatggcgaaatatagtaaaaatcggggaagatgtaatcttagtccgattaagtgaaccacatgcataaacctgcttgtctgccgcagattggcaaatgccggaagtctcgattcttccggcacatttcatttagaaatatgcaaatcggcgctcaacgaatgcagtaagatgtggtaaaataagtgggaaattccgcttttttaaatgtttgtcgaaaggttggatcatcatgaatacatatcacccattcagtcttaccacaccctcgacactcatgatacaagactgggttcaaacgaatcaaaacaacaaaaaagtcattgccggatttacgacaaaaaacggcggtgtcagccaaaagccttttgaatcgttaaatacaggattgcacgttcatgacaaagatgcagatgtagttaaaaatcgtgaatatattgccgatatgtttaatactgatttgcagtcttgggtattcgctgatcagacacatgataatcgcgttcagaaagtgacgcagagggataggggaaaaggcgcccgtgagtatcacacggctctaaaagcaacggacgggctatatacaaatgaaaaaaatgtatttttagcattatgctttgctgattgtgtgcctcttttcttttatgatccggttaagtcgcttgtcggagtcgcccatgccgggtggaaaggcaccgtcaaacagattggcagagaaatggtgaagcaatggactgagaaggaaggttcaaatccctcagatatttacgctgttattggcccgtctatcagcggagcatgctatacggtagacgaccgcgtcatggatgctgtccgcgcattgccggtttcagcagaccttgccgttaatcagacggcaaaggcacaatatcagcttgatctgaaagagctgaaccgtcttatactgatggacagcggtttggcaagtgaacaaatttctgtcagcggtttatgcacggaaagcgagccgtctcttttctattctcaccgccgcgatcaggggaaaactggacggatgatgtcctttatcggaatgaaggaggcataaaagatcttgcgtgttgttgataatttacgacatataaacgaacgaataaacgaagcatgtaacagatcgggccgcagctccgacgaagttacggttattgcagtcacaaaatatgtatcacctgaaagagcacaggaggcagtagatgctggcatcacctgcctcggagagaatcgggatgcggaactgctccgcaaacaggaattgatgaaagggaatccggaatggcattttatcggcagtctgcaatcaagaaaagcaaaatctgtcgtcaatgcggtttcctatatccattccctagaccggctctcattagcgaaagaaattgaaaaacgggctgaaggtactgtacgatgctttgtgcaggtcaatacctctcttgagccttctaaacatggcatgaaaaaagaagaagtcattccattcatacaggagctttccggtttcgaacatatccttgttgccggactgatgacaatggctccgctgactgatgatcaagatcagatcagaagctgtttcaggtcgctgagagaactccgtgaccaggttcagaagctgaaccagccgaacgctccgtgtactgaactgtcgatgggcatgtcaaatgattttgaaattgcaattgaagaaggagctacttatattagaatcggctcatcgttagtcggaaatgaaacagggggtgtacagcaatgagtatgaaaaataaactgaaaaactttttctcaatggaagatgaagaatacgaatatgaatatattgagacagagcgggaatctcatgaggagcatgagcaaaaagaaaagccggcttatacggggaataaaccttcgggcaaacagaatgtagtgagcttgcaaagtgttcagaaatcctctaaagtggtgttgagtgagccgcgcgtttatgcggaggcgcaggaaatagccgaccatttgaagaaccggcgggcagttgtcgtcaatcttcagcggatacagcatgaccaggcgaagcggattgttgactttttaagcggaaccgtttatgccattggcggcgatattcaaagaatcggctcagatattttcctctgcacgcctgacaacgtagatgtatcaggcacaatttctgagctcatatctgaagacgaacatcagaggtggtaaagcgagatgatcctttatcaagttttttcggttttaagcttattaatcacaatatactcatttgccctgatcatatatatttttatgtcatgggtgccgagtacgagggaaacagcagtcggacgttttttagcttcgatttgtgaaccatatctcgaaccattcagaaaaatcatccctccgattgcaatgctggatatttcaccaatcgtagcaatacttgtgcttcggtttgcgacaaccggcttgtggggactttatcgcatgattgcgttttaatgtgacagtttgataggggcttggcagcagccaagcctctttacatagaagggaaagacgatgagcgatatatatcagcacttcagaaaagacgagcgggcctttattgatcaggcgctcgaatggaaaagaattgtccaggagcagtaccggatgaagctgaccgactttttagatccccgagagcaggtcatcctctctgctgttacgggacaggctgatgtcgggcttgctttttccggcggctatgacagagcggagcgaaaacgggcgattctgtatccagagtacattactccggaagaatcggattttgaattgcaggcgtttaacgtccgttatgctgacaagtttgtctcagtagatcatcgttctctgcttggtgcattaatgggcataggattaaagcggcaaaaattcggtgacatcgtgttttctgagacagcagtgcaattgattgtctcagccgataccgctgattttgtggctgcacagctgacccaagcaggcaaagcggcggtcagcctagagaaaattgacttgtcagaccttaacattccagcagttgatgtcgaaataagagatgacacggtttcttctttaaggcttgacgccgtctgcgcctctatgagcaggcaatcccgccagaaatcacagacgcttgtgaaaaacggccttgtgaaagtgaactggaaggtggttgaagatccttcatacatagtcgcggaaggggacatgctgtcaatcagaggttttggccggtgcagcttaacaaaaatcgaaggaaaaaccaaaaaagacaaatggagagttacgtttgaacgacaaaaatagtcggtttttcagtttttttctccatctgtgcgaaatttgttttataatgtgaactagataaccgtactgaaatgtaaaaaatggaggtggcatcatgccattaacgccaaatgatattcacaacaagacgtttacaaaaagttttcgcggatatgatgaagatgaagtaaatgaattcctagcccaagtcagaaaagattacgaaattgttctccgcaagaaaactgagcttgaagcgaaagtcaatgagctagatgaaagaatcggacactttgccaatattgaggaaacattgaataaatcaattttagttgctcaagaagcggctgaagacgtaaaacgcaattctcaaaaagaggcaaagctgattgttcgggaagcggagaaaaacgctgatcgcattatcaacgaatcgttatcaaaatcaagaaaaattgcaatggaaattgaagagctgaaaaaacagtctaaagtgttcagaacacgtttccaaatgctgattgaagctcagcttgatcttctgaaaaatgacgattgggatcatctccttgagtatgaagtcgacgctgtatttgaggaaaaggaataaattctctgattatcttgacattttcttagcttgtcgaatataatacgttcataaattcagatgaaaaaacggttgaaagggacagtcatgtttccttcaggccttcatagcgacccggagatggtgagagtccgggatggccggaatcatgtagatcagccctttagtttccttgctgaactcacagtaggttaggacgttcatcacgttacgatgctcaagaggaaaaagtgtatgctggctttttctaaaagggtggtaccgcgagataagctttctcgtcccttatgggatgagagggctttttttattttctgaaaaaatgcagtggaggaatgaaaatggattttaaagacacgctcttaatgccgaaaacagatttcccgatgcgtggaaatttgccaaaccgtgagcctgacattcaaaaaaaatgggaggaagaggatatctaccgtcttgttcaggaacggacgaaagaccgcccgaaatttgttttacatgacggacctccgtatgcaaacggcgacatccatatgggccatgcacttaacaagattttgaaagacttcattgtccgctataaatcaatgagcggctacaacgcaccgtatgtgccgggctgggatacacacggattgccaattgaaacagctctgacaaaaaacaaaaaggtcaaccgcaaagaaatgtcagtagcggaattccgcaaactatgcgaagagtacgcttggaagcaaatcgagggacagcgtgagcaattcaaacgtcttggtgtccgcggtgactgggaaaacccatacgtgacattaaaaccggaatacgaagcgcagcaaatccgcgtatttggtgaaatggcaaaacgaggctacatttacaaaggccttaaaccggttaactggtcaccttcaagtgagtctgctctggctgaagccgagatcgaatatcaagacaaacgttcagcatctatttacgtcgcttttggtgtaaaagacggaaaaggcgttcttgaaaacggcgagcgcatcattatttggacaacaacgccttggacaattccggcgaacctcggaatttcagtgcaccctgatcttgagtacagcgtgattgcagtaggtggtgaccgctttgtcgtagcaagtgcattagtcgaaaatgttgcatcggcatgcggatttgatcagtatgaagtgacaagaacggtcaaagggaaagaccttgagaacattatcgctgaacacccgctatatggcagagactctctcgttatgcttggtgaacacgtaacaactgatgccggaacaggctgtgttcatacagcgccaggacatggggaagatgactttatcatcggccaaaaatacggtttagatgtgctttgcccggttgatgaaaaaggtgtaatgacaagcgaagctcctggctttgaaggcatgttctatgatgatgcaaacaaagcgatcacacagcagctcgatgaaaaaggcgcacttgtgaagcttgaattcattactcactcttatccgcatgattggagaacaaaaaaaccaaccattttcagagcgacagcgcaatggtttgcgtctattaaagatttcagatcagacctgctggatgccattaaagaaaccaaatgggttcctgaatggggcgagcagcgtttgcacaacatggttcgggaccgcggagactggtgtatttcgagacagcgtgcgtggggtgtgccgattccggtattttacgctgaaaacggagaaccgattattacagatgaaaccattgaacatgtttctgaattgttcagacagcacggatcaaacatttggtttgaaaaagaagcaaaggatcttcttccggaaggctttacgcatcctggcagcccgaacggcacatttacaaaagaacaggatatcatggatgtttggtttgattcaggctcttcacatcaagcagtgcttgaagaacgtgatgacctcgttcgcccggctgatttatacctagagggatctgaccaatatcgcggctggtttaactcttctctttctacagcagtagccgtaacagggaaagcgccgtataaaggtgtgctaagccatgggttcgcactggatggagaaggacgcaagatgagtaaatcaatcggtaacgttgttgttccggctaaagtcatgaaacagcttggtgccgacatcttaagattatgggtatcttcagtggattatcaggcggacgttcgcgtgtctgacgccattctaaagcaggttgcggaagtatatcgtaaaatccgcaacacgttccgtttccttcacggcaaccttttcgattttgatccaaaaacaaatgcggtggctgtcgaagatcttcgtgaagtggatcagtatatgctgattaagctgaacaagctgattgataaagtgaaaaaagcgtatgatgagtacgaatttgcggttgtgtatcacagcattcataatttctgcacaatcgaattgagctcattctaccttgattttgcaaaagatattgtctacatcgagcatgcggatcatccggatagacgcagcatgcagacagtattctatgaaacgcttcttgctttagtgaagctttcagcgcctatccttccacatacggcagacgaattgtggtctcatttaacatttgttgaagagcagagcgttcagctgacagatatgccggaaacaatcgcggttccaaacagtgaagtgactgaagaaaaatttgaccgttttatggctcttcgtgatgacgtgctaaaagcattagaaactgcgcgaaatgaaaaaattatcggtaaatctttggaagcaaacctgaaattgtatccaaacaaagaaaacaaagagctcttggcttccataaaagaaaacctttctcagctgtttattgtgtctgaactgacaatcagcgaagaaaatgatgcgccgaacgatgcgcaaagctttgcgacgggtaaaatcgctgtcgagaaagcggaaggcgaaatgtgtgagagatctcgtgtgatttcaaaagatgtaggggcaaatccgaaatatcctacactttcattacgcaacgctgaaatcgttgaaaaatactatcaaaaataatgaaaagggcccggcgtaaaagccgggctttttttgtgccaagagtgacatcctttagaacggcaggaaaaatcttatgggctttagatcatcattcataggcaacaataaaggtactacgttaagagcaggagttgtgaagaatgaatgatcaactgaccgcaatttatacggaacttcttctgatgaaagaagaattacagtcgagattatttgagtattcttgctttcaggtttctacaagcccgcaagcagcaatcaatcataaacaaaaagcaactctgatctatcatattaaagaagagcttcaagacgttctccttgcattgtccaaaatcgaaaacggcacattcggatactgtgaagaaaccggggctcccattcctctttcaaagctggcagtgctgccgacggcccgaacagcaaacgattttctttattctgtccaatttgagaaaaaaacgcttccgatatggaaatcaacggatatcgaatatggtcaggcactgtatgaataacagtgtctggccggttattatgcctgatatttctttactccagtgctttttattgataaaatgcataatggattaaagtaaccgtaaactggaggaacgtttgtgctgtattatatgattgcactacttattattgcagccgatcaattgacaaaatggctagttgttaagaacatggaacttggccaaagcattccgatcattgatcaggtattctatatcacctcccatcgcaatacgggtgctgcatgggggatattagcgggtcagatgtggtttttctacctcataacaaccgctgttattattggtattgtttattacatacagcgttatacaaaaggacaaaggcttcttggcgttgctctcggacttatgcttggcggtgccatcggcaactttatcgatcgggctgtcagacaggaagttgtggattttatccatgttattattgtcaattacaattacccgatatttaacatcgcggactcttcattatgtgtcggcgtaatgcttttatttatacaaatgctgttggacagcgggaaaaagaaaaaggagcaatagcatgaatcaaattgatataaccgcttcagaagaacaaaaaagtgagcggattgataaatttttggcatcgactgagaatgattggtcaagaacccaggttcagcaatgggtaaaagacggacaggttgtcgtgaacggaagcgcggtgaaagcgaattataaaattcagccgggtgatcaggtgaccgtcactgtacccgaaccggaagcgctcgacgtcctggcagagcctatggatctggatatttattatgaggaccaggatgtgctggtcgtcaacaaacctcgcggaatggttgttcacccagcacccgggcatcttacgggcacacttgtaaacggccttatggctcattgcatagacctttccggaataaatggtgtgatgcgcccgggtattgttcacagaatcgataaggacacgtccggtttattaatggtggcgaaaaatgatatggcgcacgagtcacttgtaaaccaattggtcaacaaaacggtcacgcggaaatatacggcagttgtccacgggcttatttctcacgatgatggcacaattgacgcgccgatcggacgagataagaaagaccgtcaaagcatgactgtgacacgtgatggcaaaaacgctgtcactcattttcatgtactagagcgttttcaggattttacgttagtggaatgccagcttgaaacagggagaacccatcaaattcgtgttcatatgaaatatatcggcttcccattagcaggcgatccgaaatacggcccaagaaaaacaatcgactttaatggccaagcgcttcacgcgggagttttaggttttgaccatccacgaacaggagaatatgtcgaatttgaagcgccgcttcctgaggatatggcagaattaatcgaaaacctcagaaaaaacggttgacagagggtttcttttctgaaataataaacgaagctgaatagattctttaaaacagtccagagaggctgagaaggataacggatagacgggatgcgtgtataggcgcgcaccttgtcctaaaacccctctatgctctggcaggaggggttttttcttctatatgaactgtgaggtgtcacacattgaatcaaaaagctgtcattctcgacgaacaggcaatcagacgggcgctgaccaggattgctcacgaaatgatcgaacgcaataaaggaatgaataactgcattcttgtcggcattaagacaagagggatttatctggcaaaacgccttgcggaacgcattgaacagattgagggaaatcctgttacagtcggtgaaattgatattactctttacagagacgatctttctaaaaaaacgagcaacgatgaaccgcttgtaaaaggtgcagatattccggtagatatcacagatcaaaaagtcattctcgttgatgatgttctgtataccggaagaacagtcagagcaggaatggatgcgcttgttgatgtaggcagaccttcctccattcagcttgcagtgcttgtggacagaggacaccgggagctgccgatccgagcggattatatcgggaaaaacatcccgacatcaaagtctgaaaaggttatggttcagcttgatgaggtagaccaaaacgatctcgtcgccatttatgaaaacgaataatagatcacctttttaagggcaatccagagaggttgcaaagaggtgcacaacaaaggcccaaaaagcattcggcaggtctttgtatgcctctttgcgtaaaaaagcaaagaggtttttttatacagtcattgagtcatcctaaaatgaaagtcaacaatcagggggaaatcatcatgagtaagaaaaaagtaaatttaggggtcagggatgtcccgacacctttctcttgggtttcattcagccttcagcatttgtttgccatgtttggctcaaccatcttggttccgaagctcgtcggaatgagtcctgctgtggcgttggtgacaagcggcatcggaacactggcgtaccttcttattacgaaagggcaaattccggcgtatctcggttcatccttcgcctttatttctccgatcattctggtaaaagcgaccggcgggccgggagcggcaatggttggagcgtttcttgcagggctggtgtacgggctgattgccttattgatcaggcagcttggaacaggatggctgatgaagattctcccgcctgtagtcgtagggcctgttattatcgtcatcgggctgggactggcaagcactgcggtaaacatggcgatgtatgctgatccaaatgcgagtgagttggtctacagcttaaagcactttagtgtcgcaggagttacgctggcaatcacgattatttgtgcgattttcttacgaggatttttaagcctgattccggttctgatcggaatcatcggcggatacctgtttgcccttactcaagggattgtcaacttccagccggtgcttgacgcgaaatggttcgcagtgcctgaatttatcattccgttcaaagattattcaccatcagttacactcggcatcgcagccgcaatggttcctgtcgcatttgtcacaatgtcagagcatatcggccaccaaatggtgctgagcaaggttgtcggacaagacttcattaaaaagccaggtcttcatcgctctattatgggtgacagtgtggcgacaatcctcgcttccctgatcggcggtccgccgacaacgacttacggagaaaacattggcgtgctggccatcacaagagtattcagcgtctttgtcatcggaggagcggcagtgattgcctgttgcttcggctttatcggcaaaatttcagcgctgatcagttcagtgccgtcagcggtcatgggaggcgtctccttcctgctgtttggaatcattgcttcaagcggtctgagaatgctgattgacaacaaaattgattatgaaaacaacagaaacctcattattacatcagttatccttgtcatcggtgtaggaggcgcttttatccaagtgtctcaaggcggattccaagtgtcaggaatggcgcttgccgcaattgtcggtgtcatcttaaacctgattcttccgcaggcgaaggaagagcagaaagacacatctgaacaacatcatatctaaaaccttttaatgaaagtccagagaggcttggaagggttatgaagagaagggagcttcaatgctgccctctatttaaccataccccgagtctatcttagaccggggtttttttcagccttaagttgaaaagagaggggaaagaacatgaagcatttaacgacgatgagtgaactcggcactgaggaaatcaaagatttgcttcaaacagcacaagaccttaaaagcggaaaaacagacaatcagcttacaggaaagtttgccgcaaacctgtttttcgaaccgagcacgagaacgcggttcagctttgaggtcgcagaaaaaaagctgggcatgaatgtgctcaaccttgatggaacaagcacaagcgtgcaaaaaggcgaaaccttatatgacacgatccggacgctcgaatcaatcggtgtggacgtctgcgtcatcaggcacagtgaggatgagtattatgaagagcttgtcagccaggtgaacattccgattctgaatgcgggagacggatgcggccagcatccgacacaatcactgcttgatttaatgacgatttatgaagagttcaatacgttcaaagggcttaccgtctccattcacggcgacatcaagcatagcagagtggcaaggtcaaatgcggaagtgttgacaagattgggtgcccgggtcctattttccggcccttcggaatggcaggatgaagaaaatacattcggtacgtatgtctcaatggatgaagcagttgagtcttccgatgttgtcatgctgctgcgcattcaaaatgaacgacatcagtccgctgtcagccaggaaggctatttaaacaaatacggcttgaccgtagaacgggctgagcgtatgaagcggcatgcgatcatcatgcatcctgctccggtaaacagaggagtggagattgatgacagcttagtagaaagcgaaaaatcaagaatcttcaagcaaatgcaaaatggcgtatttatcagaatggcagtgatacagcgtgccttacaaaccaatgtgaaaagaggagaagcagcgtatgtcatatctcattaaaaacggctggatactaaacgaaaatggtgaaaaaacagaagcggatatccgagtgactggagaaaccatcaccgcaatcggcaagcttgatgcaacggataatgaaacggtaattgatgcgaaaggtttgctcgtttcacctgggtttgttgatctccacgtgcatttcagagagccgggcggagagaaaaaagaaactattgaaaccggggccaaagcggcggcacgcggcggctatactacagtagcagcaatgccgaatacgcggccggttcctgatacaaaggagcagatggaatgggtgcaaaacagaattaaagaaacatcatgcgtcagagttcttccatatgcatccattacgatcaggcaaatcggcgatgaaatgacaaactttgaagcattaaaagaagccggggcatttgcttttacagatgacggtgttggtatacagacagcaggtatgatgtatgaagcgatgaaacgggcagctgcaattgacaaagcgattgttgcacattgcgaggacaactccttaatttacggaggaagcgtacatgaggggtcattctccaaagcgaacgggctaaacggcattccttctgtgtgtgaatcggttcatattgcccgcgatgtgctgctggctgaggcggcaaactgccattatcatgtatgccatatcagcacgaaagaatctgtcagagttgtacgcgatgcgaaaaaagcgggaatcagagtgacagcagaagtgtcgccgcatcatttgctgctttgtgatgaggatatcccggggctggacacaaactataaaatgaatccgccgctccgcagtgcagaagacagagctgctttaattgaaggtcttttagacggaacaattgattttatcgcaacagaccatgcaccgcatacggaagaagaaaaaaacacagaaatgaaactggcgccattcggaattgtcggcttagaaacagcattcccgcttctttacacacactttgtcaaaaatggcagctggtcgctgaagcagttgattgactacatgacaatcaagccatgcgaagcgttcggtctcccatatggaacattacaaacggggcaagctgcggacattacgttaatcgatttagaaaaagaagcagttatagacaaagacacgtttttatcaaaaggaaaaaatacaccattcaacggcatcagctgcaccggctggccggtcgctacaattgcggcagggaagcttgcttatgaagaggggagacttgtcaaatgaagagacgattagtactggaaaacggagcggtattcgagggagaagccttcggaagcttagaacacaacatgggagaagtcgtttttaatactgggatgacaggctatcaggaaattttatctgacccttcttactgcggacagatcgtaacattaacatacccgcttatcggaaattacggcattaaccgtgatgattttgaatccattaccccttttgtaaaagggctgatcatcaaagaattatgtgagctgccttccaactggcgttcagcatacaccttagacgagtatttaaaaatgaaaaacattcccggactccaggggattgatacaaggaagctgacaagaatgatccgcacggcaggcgcgctaaaaggaacattcgcttcatctgatgaagatatcgaagcagtgctgaaaagactgaacgaaacggaattgccaagaaatcaagtatcccaagtatcagcaaaaacagcatatccgagcccgggaagaggcaaacgcatcgtcttggttgacttcggcatgaaacacgggattctaagagagctgaacaaacggaaatgtgacgtcatcgttgtgccttacaacattacagcggaagaggtgcttcagctgaaaccggacggtatcatgctttctaacggacctggagacccgaaggatgtgcctgaagcgattgaaatgattaaaggtgttcttggaaaagtgccattattcggaatatgtcttggccaccaattattcgcgctggcgtgcggggcgaatactgaaaaaatgaaattcggccacaggggctcaaaccacccggtaaaagagctggctacaggaaaagttgccttaacatctcaaaaccatggatatacagtttcgtctatcagtaaaacagaactggaagtgacgcatatcgcaattaacgacgatacgattgaagggctgaagcataaaacattgccggcatttacggttcaatatcatcccgaagcctcacctggtcctgaggatgccaaccatctatttgacagattcatcgaaatgatcgaaacaacagagaaagaaggggaagcggtatgccaaaacgcgtagacattaacaaaattttagtaatcggatctggaccgatcatcatcggccaagcagcagaatttgactatgcgggaacacaagcctgtcttgctttgaaagaagaaggctatgaagtcatccttgtcaactcaaaccctgcaacgatcatgacagatacagaaatggctgaccgggtttacatcgaaccgctcacacctgaattcctgacacgaatcatcagaaaagagcgcccggatgccattcttcctacactcggaggccaaaccggtttgaatcttgcggttgagctttctgaaagaggcgttttggcagaatgcggcgtcgaagtgcttggcacgaaactgtctgcgattcagcaagctgaagaccgtgacttgttcagaacattaatgaatgaactgaatgaaccggtgcctgaaagtgagattatccactcccttgaagaagcagaaaaattcgtcagtcaaattggattccctgtcattgtccgcccggcatatacattaggcggaacaggcggaggtatctgctcgaatgaaacagagctaaaagaaatcgttgagaacggcttgaaattaagcccggtacaccaatgtcttcttgaaaaaagcatcgccggctataaagaaatcgagtatgaagtcatgagagacagccaggatcacgccattgtcgtttgtaacatggaaaacattgatccagttggaatccatactggagacagtattgttgtcgcgccgagccaaacgctcagcgatcgcgagtatcagctcttgcggaatgtatcgttaaaactgattcgcgcgcttgggatcgaaggcggatgtaacgtccagctcgccttagatccagacagcttccaatattacattattgaagtaaatccgcgtgtcagccgttcatctgctcttgcatcaaaagcaacgggatacccgatagcaaagctcgctgctaaaattgcagtcggactttcattagatgaaatgatgaacccggtgacaggaaaaacatatgcagcatttgaacctgctcttgactatgtcgtatccaaaattccgcgctggccgtttgataaatttgaatcagcaaacagaaagcttggcacgcaaatgaaagcgacaggtgaggtcatggcaatcggccgcacgcttgaagagtcattgctgaaggcagtgcgttcgctggaagcggatgtgtatcatcttgaattgaaggacgccgctgacatttcagatgagcttcttgaaaagcgaattaaaaaggccggtgatgaacgcttattctacttagctgaagcgtacagaagaggctacacggtagaagacctccatgaattttccgctatcgatgtcttcttcttgcataagctgttcggaatcgtacagtttgaaaaagaattgaaggccaatgcgggcaatacggatgtgctgagacgggcaaaagaactcggcttctctgatcagtacattagccgcgagtggaaaatgaaagaatctgagctttacagcttgagaaaacaagcggggattgcgccggtattcaaaatggtagatacgtgcgcggcggaattcgagtcagaaacgccatacttctatagcacatacgaagaagaaaatgaatctgtcgttacagataagaaaagtgtgatggtgcttggttcgggtccgattcgaatcggtcagggtgtcgagttcgactatgcgacggttcactctgtatgggcaattaaacaagcaggctatgaagccattattgtcaacaacaacccggaaaccgtttcaacagacttcagcatctcagacaagctgtattttgaaccgcttacgattgaagatgttatgcacatcattgaccttgaacagccaatgggcgttgtcgtacagttcggcggacaaactgcgattaaccttgctgacgagctttctgcacgcggagtgaaaatccttggaacttcattagaagatttagaccgtgcagaagaccgggataaatttgaacaagcgcttggagaacttggtgttcctcagccgcttggcaaaacagcgacatcagttgatcaggcggtaagcatcgcgagtgatatcggttatccggtactggtgcgcccttcctatgtacttggcggccgggcgatggagattgtttaccatgaagaggaactgcttcattacatgaaaaatgcagtcaaaatcaatccgcagcaccctgtattaattgatagatacttgaccggaaaagaaattgaagtcgatgcagtatccgacggtgaaacagtcgtcattccgggaattatggagcacattgaacgtgcgggcgttcactccggagactcgatcgctgtttatccgcctcagtctctcacagaggacattaagaaaaaaattgaacaatacacgatcgcattggctaaagggctgaatattgtcggtttgctcaatattcaattcgtcttgtcgcaaggcgaggtgtacgtgctagaagtgaatccgagatcaagcagaaccgtaccgtttttaagcaaaattacgggtatcccaatggcgaatctcgcaacaaaaatcattcttggtcaaaagctggctgcgtttggctatacagagggccttcagcctgaacagcaaggtgtatttgtaaaagcgccggtcttctcctttgccaagctgagaagagtggacattacgttagggcctgaaatgaaatcaacaggtgaagtcatggggaaagattcgacacttgaaaaggcgctctacaaagccttgattgcttcaggtattcaaatcccgaactacggttccgtgcttttaaccgtagctgataaggacaaagaagaagggcttgccattgctaagcggttccacgcgatcggctacaacattttagcgacggaaggaacggcaggctacctgaaagaagcttccattccagcgaaggtcgtcggaaaaatcggtcaggatggcccgaacttgcttgacgtcatcagaaacggagaagcgcagtttgtcatcaatacgctgacaaaaggaaagcagccggcaagagacggttttagaatcagacgtgaatcagtagaaaatggtgttgcctgcctaacatctttagatacggcagaggcgatattgcgagtgctggaaagcatgacattccgtgctgatcaaatgccggcagtcaacacaaatcaggaggcggcagtcactatatgaaaaaagcgtatttgacagtatgttctaaccagcaaattgcagaccgggtgtttcaaatggttctgaaaggggagcttgtccaagggtttacaacccctggacagttccttcatcttaaagtgagcgaagcggttacgcctcttttgagaaggccgatcagcatcgcagacgtcaactttgaaaaaaatgaagtcaccatcatttatcgggtagatggtgaagggacaagactcttgtcactgaagcagcagggagaacttgtggatgtcctcgggcctttgggaaatggctttcctgttaatgaagttcaacccggaaagacggctttgctggtaggaggcggagtaggtgtgccgcctctccaagagctgtcgaaacgcttgattgaaaaaggggtaaatgtcatccacgttttaggattccaatcggcaaaggatgtattttacgaggaagaatgcaggcagtacggagacacgtatgtggcaacagctgacggaagctacggggaaaccggatttgtcacagatgtgattaaacggaaaaatctagagtttgatatcctcctcagctgcgggccgacaccgatgctcaaggcgttaaaacaggaatatgcccataaagaagtatatctgtccatggaggaacgaatgggctgcggaatcggcgcatgcttcgcgtgtgtgtgccatacaaacgaaagtgagacatcctatgtaaaagtatgtctcgacgggcctgtatttaaagctcaggaggtggcgctgtaatgctagaggtgaaattgccgggacttgatttgaaaaacccaatcattcctgcatcaggttgcttcggttttggaaaagaattttcacgtttttatgatttgtcttgtcttggagccatcatgattaaggctacgacaaaggagccgcgctttgggaatccgacgccgcgggtagctgagactggtgctggaatgctcaatgcgatcggtctccaaaatccggggctggatagtgtgttgcatcatgagctgccgtggcttgagcagtttgatacaccgatcattgccaatgtcgcaggttctcaagtcgatgattatgttgaagtcgcagaacatatcagcaaagcgcctaatgtccatgcacttgaattgaatatttcctgcccgaatgtgaaaacaggcggaatcgcttttggcacgaatcctgaaatggctgccgatttgacaaaagcggtgaaagaggtttcggatgtacccgtttatgtgaagctttccccgaacgtggctaatatcacagaaattgccttagcgatcgaggaagcgggagcggacggtcttacgatgatcaacacactaatcggcatgagactcgatttaaaaaccggcaaaccgatattagcgaataaaacagggggactttcaggccctgctgtgaagccggttgccattcgcatggtgtatgaagtcagccaggcggtcaacatcccgattatcggaatgggaggcgtgcaaacggctgaagatgccctggaatttcttctcgcgggagcaagcgcagtcgctgtcggaacagcaaactttgtgaatccttttgcatgtccagagattattgaacagctcccatctgttttgctccaatacggctatcaatcaattgaagaatgcatcggaaggagctggaatcatgaaaaacaacctgcccatcatcgcgcttgattttgcgtcagctgaagaaacacttgcgttcttagcgccttttcagcaagaaccgttatttgtaaaggttgggatggagctcttttatcaagaagggccatctatcgtgaaacaactaaaagaaagaaactgcgagctatttttagatctaaagcttcatgacatcccgactactgtaaacaaagcgatgaagcgccttgccagtcttggagtagacctcgtcaatgttcatgctgccgggggcaaaaaaatgatgcaggcagctctcgaaggcttagaagaaggtacgccggctgggaaaaaacgtccgtcacttatcgcggtaacccagctgacaagcacatctgaacaaatcatgaaagatgaactgctgatcgaaaagtctctgattgatacggttgtgcactacagcaaacaggcggaagaaagcggactggatggagtggtctgctctgttcatgaagcaaaagccatttaccaagcggtgtcgcctttatttctgactgtcactccggggatcagaatgtcagaggacgctgcgaatgaccaagtccgcgtagcgacgcctgccattgcaagagagaaaggttcatcagcgattgtagtaggacgctcgattacaaaagcggaagacccggtaaaagcctataaggctgtcagacttgaatgggagggaatcaaatcttgaaacaaatcatcgcaaaacatctattagacatccaagctgtatttttacgcccgaacgagccgttcacatgggcaagcggcattttatcaccgatctactgtgacaaccgccttacgctatctttcccagaggtcagaaacgatgttgcttcaggtatcagcaagcttgtcaaagatcattttcctgaagctgaaatgattgcgggaacagcaactgccggtattcctcatgctgctcttgcggctgaccgtttgaatcttccgatgtgttatgtgaggagcaagccgaaggcgcacggaaaaggcaatcagattgagggagctgtgcaagaggggcaaaaaacagttgtcattgaagacttaatttccacaggaggcagcgtgcttgaagcttgtgcagctttacaagcggccggctgtgaagtgcttggtgtcgtctcaatctttacgtacggacttcccaaagcggaggaagccttcgcaaaggcagaactgctatactactcattaactgattatgatacgctcacagaggtcgcgcttgaaaacggaaatattcattcagatgatctaaaaaagctgcaaacatggaaacgaaatcccgagtcaaaagattggtttaaaaaataaaaaataaattcaaatgatgtaaagaggcttcaaagccttgctgtacttgaaaacaggctgtgaggcctgtttttttattaatcctataaaaaaagtcgggttgacttatgttagaattgtgctaaaatttactacaaatctaaaaacttatcaagagcggctgagggactggacctatgaagcccggcaacctgcatagtttgtaaggtgctacttccagcaaaatgaattccattttgaaagataagggctgcatgctgttcctgtctttctttccgccggattgaaagttttttattttaagaggaaaaaaggctgtctgtgatatcagcagccgcgaatcacattacaattgggaaaagacaaccggcagaaagctactgtttgtttgtctccgaaaggaggaaagaagaaatgttaacgtacgataattgggaagaaccaacgattacatttccggaagacgatccttataaaggagcgctgtcagttttaaaatgggcatacggccattacggcaatcagcttgtttatgcctgcagtttcggaattgagggaatcgttctgattgacttaatttataaagtgaaaaaagacgcagagattgtgtttcttgatacaggacttcattttaaagaaacctatgaaacaattgaacgagtgaaagagcgttatccgggtcttaatatcatcctgaaaaaaccagacctcacccttgaggaacaagccgaagaacatggtgacaaactgtgggaaagagagccgaatcagtgctgctatcttagaaaggtcgttcctttaagagaggcgctttcaggacatccagcctggctttccggcctgcgccgtgatcaagggccaagccgtgccaatacgaatttcttaaacaaagatgaaaaattcaagtcagtaaaagtttgcccgcttatccattggacttggaaagacatttggagatacacatcccggaatgaactggactacaatccgcttcatgaccaaggatatccaagtattggctgtgcgccttgcactgctcccgcttttactgcagaggatttgcgctcaggcagatggaatggtatggcgaaaacagaatgcggactgcatgaataaggagctgcaaaatggaattagccgctattttatttagcttgtttttcgcgatgaatattggtgcaagcggcgctgcagcttcgatgggggttgcttacggctccggagccatcaaaaagaaaacctacgctttgatcctatgcgcagtcggtgtctttgccggggcggtcattggcggaggcgaggttgtaaaaacaatcagctccggcattattcctgagcagacgattacactgacgattgtttgcatcattattggagctgctgccctgtcgctctttactgctaatctgctcggcattcctttgtcgacaagtgaagtaacagtcggcgcggttgtcggcgtgggagtggcttataaagtattgtttgtgaacaatcttctgatcattgtgtcattttgggtttttgtcccgctgttcgctttcggcttcacctatttcgtatctaagctgtttcgttattttaagattgaagtaaaatcttctaaaaaacaaaaaatcctcggcattgttttgttagttgccggatttttcgaagcattctctgccggcatgaataacgtggcgaatgctgttggcccgttagtagctgccgatgtgcttgatgtcggaaaaggaaccttgtatggaggagcttttgttgctcttggcgcactgttattaggccggcgtgtgctagaaacaaacgggaagaaaattacgagattctccaaaggggaaggcattctcttatccggtacaggagcaggacttgtgatcatcagttctgtatttgggatgccggtgcccttggcgcaagtcacgtcatcgtctattatcggaataggcatggcaaaaaacggtccgaacgtgttccataaacaagttgttcaaacgatgctgaaggtatggatcgtatcgccgtttttatctttatcgatttcttatctgcttgtatccttgtttttaaaagcagattattattcgatctttatcatggtaagtgtgcttttagcggcgggcggtgccatcagcctgacaaaggccattcgtaaagagagacgctcagtccacgaacaaggcgggggaatctgatcattaatctgagtaattttataagttaactaggaggagatggatattatgagcttagcaccacacggaggaacattagtaaacagagtagatgaatcatatgatgtgagcggcattcaaaaagaaattgaacttgatttaatttctttcgcggatttggaattgatcggtatcggtgcatacagcccgattgaaggtttctttaatgaaaaagattacgtatctgttgtcgaaaacatgcgtctttcttccggtgttgtttggtctcttccaatcacgcttccggtcgatgcgcaaaaagcagcggaactgtcacttggtgaaacggtaaagttaacgtatgaaggagaaacatacggcgttatccaaatcgaagacctgtatgtgcctgacaaacaaaaagaagctgtcaatgtgtacaaaacagatgaacaggagcatcctggtgttaaaaagctgttcagccgcggcaatacatatgtcggcgggccgattacgttgattaaaaaagcttcaaaacagttccctgaatttacatttgaaccgttagaaacgagacgccagtttgcggaaaaaggctgggaaaccattgtcggtttccaaacaagaaaccctgttcacagagcgcatgaatacattcaaaaaacggctcttgaaacagtagacggcttgttcttgaatccgttagtaggtgaaacaaaatctgatgacattccagctgatgtacggatggaaagctaccaagtgcttcttgatcattattacccgaaagatcgcgttttccttggtgtctttttagcggcgatgcgttatgcaggcccgagggaagcaattttccacgcgcttgtcagaaagaactacggctgcacacatttcatcgtcggccgtgatcatgcaggtgtaggtgactattacggaacatacgaagcacaggagctgtttgacacatttaaacctgaagaactcgggattacgccgctgaaatttgagcacagcttcttctgtaaaaaatgcggaaatatgggaacagcgaaaacatgccctcatggcagagagcatcacgtcattttatcaggcactaaggtaagaggtatgctgagagacggtgtgctgccgcctgctgaattcagtcgaaaagaagtcgtagaagtgttaatcaaagggatgaagaaaaaagaagaagtaggcgtatcttaaggaggactggcagtgacaaatcgcgatattgtatggcatgaagcctctatcacaaaagaagagtaccagcaaaaaaacaagcataaaagctccattctctggctgacagggttaagcggctcaggcaaatcaactattgccaacgccgctgcgagagaattgtttgagcaaggctaccaagtgattgtgctggacggggataatatccgtcacggcttaaataaggatcttggtttttctgatgaagaccgaaaagaaaacatccgccgaatcggagaggtggcaaagctttttgttcagcagggaaccattgtgattactgcttttatctctcctttccgcgaggacagacaacaggttcgcgagcttgtggaagcgggcgaatttaatgaagtctacattaaatgcgaccttgatatttgtgaacaaagagatccgaaagggctttacaaaaaagcaagaaacggcgagattccgttttttacaggaattgattctccttatgaagaaccggaagctccagagctcgttcttgattcaggacaacatgaccgtgaagcgtgtaaaaatcagctgatcgagtttgttaaacaaaaattgagctgaatatgatctgctgcgttcttctcagatgccggaatgcaagcgagaacatcatcacagcgaatgctctggaagaactcgaatagatcgggggaaatacgatggggaaagtatatattgtaggagcgggtcctggtgaccctgatctgttgacaattaaagcgctgaaagccattgaaaaagctgatgtcatcttatatgacagattagtaaataaagagattttacaatatgccaaagagcaagcagacctgatctactgcgggaagcttccagattttcatacgatgaagcaggaaaccatcaatcgatttcttgtgaagtatgcgcaaaaagggaaaatggttgtcagactgaaaggcggagacccttttgtgttcggcagaggaggggaagaagcggaatgcctctctgaaaatggaattccgtttgaaatcatccccggcattacgtctggaatcgcggcagccgcttatgccgggattcctgttactcatcgggaggcgggctctaacgtcgcttttgtaacgggtcattataaaaaagaagaagattttgaggaaaagtggaaagcgctggctacaggaattgatacacttgtcatctatatgggtatcaaaaacgtgcagcagattgaaagaaaactccttgaaaacggccgggacggttctacgccggcagcctttattcattggggaacaacggacaagcaaaagtctgttttttgtacagttgacaccctttcagaaacggtgataaaagaaaacattacaaatccgagtttaattgtcattggaaatgttgtaaattatcactataagctggaatggtttgaatctgaactgaaaaaacaagatttaagcgaggcgttgtaaaaatgaaacaagcaattttatatgtcggccacggcagccgggtcaaaaaagcgcagcaagaagccacagcctttttggaaggatgcaaggcccacatctctgtgccagtacaagaaatcagctttttagagcttcaggagccggcaattgagacaggatttgaagcatgtgtgaagcaaggcgccactcatatcgcagtggtgcctctgcttcttttaacagctgcgcatgcaaaacatgatattccggaagaaattgcccgtgctgcatctcgatatccgtcagtccgcatttcatacggaaagccgatcgggattgacgaagaagtagtcaaggctgtatatcaccgaatgaaagacataggtgttccatatgaaaatgccagagtggtactcatcggaaggggaagttcagatccagatgtcaaaagagacgtaaccggtattgctaatcttcttcaggaaatggttccagtcaaggaagtcattccgtgctttttgacagcatgcggcccgaattacaaagaggttttttcagaacttaaaaaagatgacggcataacaacctttatcgttccatatttgctctttacgggtatgctgatgaatgaaatcgaacgagaggttcagaaattaaaagctcataatccgaacgtctacctctcttcctatatcggttttcatcctcatgtgaaaaacgcatttttgaaccgtgtgagagaaactgcggcaaattctgagggacaatttgattttgatggagattcatatgcttccgctgcacattagcctggaaaagaagaaggttgtgattgcggggggcggcagcatcgctctcagaaggctgaaatcggtgatttctgagggagctgatataacgctcgtcagtccggatgttgaaccggaaatcaagcaaatggcagaagagcgacgtatcaaatgggaaaaacggacaattgaaaaagaagattatctcaatgctttcttcattattgctgcgacggataatgcggcagtgaacaaagaaattgcccaatccgcttcgccttttcagcttgtcaattgtgtcagtgacgctgagcttggcaatgtatatatgccgaaaattgtaaaaagagggcatgtcactgtgtctgtttctacaagcggagccagtccaaagcacacgaaagagcttgctgaaaacgtggataagctgattgacggcgattttattgctgaagtgaacaggctttatcaggtgagaaggaagaaataagccagagcatacaaatgctctggcttttctttatgcggctcagctttttttgagcttgatgacagtatcagcatcaggcgtgacaaagacggtatgctggctgtcataggtgacgaaaccgggtttcgcgccgtttggttttttgacatgcctgatttttgtataatctacaggcactgaacttgaatctttagcttttgaaaaataagctgcaattgtcgcggcttccatgattgtttgctcatccggttcgctgcttctgatcacaacgtgggagcctggaatgtcctttgtgtgaagccagatatcgtctctggccgccgctctggtcgttaaatattcattttgacgattgttcttacccactaaaatcgtcaggcctgaggtggattcatatgtttctaacaccggattgtgcggtttttgctttttctggcctttttgctgcttagggcgtaaatatttgccctcaacaagctcttccctgatttcgctgatatcccggggagaagcggacgaaagctgctgaaacagctgatcaaaatattcgatctcttcctgtgccagcctgatttgctcctcgacaactgcgaccgaatttttcgctttctgatacttcgtgaaataggcctgtgcgttttcagaaggcgttttgtttgggtttaaaggaatcgtgattgtcgggctttcttcattataataattgatgacctcagcctgtttatcaccttttttcaacatatataaattagcggttaaaagctccccgtaaagctgaaattccttcgcgttttccgaatactccagggttttctctaattttttgattttgttggcattcttcttccgttcgttcacaacaaaacgctcaagatcctgagcctgttgcttgacccggtctcgttcagcttttccgaaataaaaacggtcgagcagttcgcttaatgaatcaaaacggcgcgcttcgccctttagatgagtcagctccagcaggtaaaaatattcctttccgtttacagtcgtaatgttgggaatgaaacggtgctctttcacttcagcaaacagtgccagcaacgcttttggcagtgtgactttgttggcaaggcctgctctgtgaaccgcttctttggcgaaaagcggagacacgcctgaaaagtggtcgacaatttgtttatcaagccttccttcttgaaagctgaggtgacgcaaaatatcatcttctgacgcctcaagaggcgatattttgtcctgagcaggcggaagcttataatcttggccgggcagtactgtacggtagctgttcattgacggtgataagtgcttaagtccgtcgatgatcacattttctgctgcgtcagtcaaaatgatattgctgtggcggcccataatttctacataaagctttcgtacggtttcatcgccaatttcgtttcggcttttgatatgaaaaatcataatgcggtctaagcccgcttgttcaattttctcaatgaatccgccttcgatatgctttctcagcaacatgcaaaacattggcggttcgcttggattttcataagcttgtgccgtgatatgcacccgtgaatagctcggatgtgccgataataatagtttttggttttttccattggcacggatgtggaaaatcacatcgtgcttatatggctgatggacttttgtaattcgtccgcccattattttctcgttaagttcgtgtgtcattccgtatgtaaacatgccatcaaacgacatatgcaatacaccctctcattcttcctgcattcgataattatagcatgaaatgggacgagtcagaataagcatgcttatagagtgatatctctataagagagcaggggagtggacgagcggaatgaagtttcatgaaatgggacaaacagatttactagaggcaaccaatacgtccatgaaacaaggattaacagaaaaagaggtaaaaaaacgccttgacaagcatggaccaaacgagctgcaagaaggggaaaaaacttcagcgcttctcttgtttttcgcgcagttcaaagattttatggtgcttgtgcttctggcggcaacgttaatctcaggatttcttggtgaatatgtagatgcggttgcgattattgcgattgtgtttgtgaatggcatacttggtttctttcaagaaaggcgtgctgagcaatctcttcaggctttaaaagagctttcaacaccgcatgtcatggcactcagagaaggaagctggacaaagattccttctaaggaactggtgccgggtgatattgtgaaatttacgagcggggacagaattggcgcagacgttcgaattgttgaagcaagaagccttgaaatagaagaatcagcgctgaccggggaatcaatcccggttgtgaagcatgctgataaattgaaaaaaccggatgtttcacttggcgatattaccaatatggcatttatgggtacgattgtgacccgcggcagcggtgtgggggttgtcgtcgggacaggaatgaatacggctatggggaaaattgccgacatgcttgaatcggcagggacattgtcaaccccgctgcaaagaagactggagcagctcgggaagattttgattgttgttgcattgcttctgaccgtacttgtcgttgctgtcggtgttattcaggggcatgatctgtacagtatgtttttagcaggtgtctcgttagcggtagcagctattccggaggggctgccggcgattgtgacagtggcgctatcgcttggtgtacagcggatgattaaacaaaaatccattgttagaaagcttcctgctgttgaaacgcttgggtgtgcgtctatcatttgttcagataaaacagggacaatgacccaaaacaaaatgacggtgacacatgtctggtccggagggaaaacatggagagtggcaggggccggctatgaaccgaaaggaagcttcacactaaacgaaaaagagatcagtgtcaatgaacataagccgcttcagcagatgcttctgttcggagcgctttgtaacaactccaatatcgagaaaagagacggcgaatatgtgcttgacggagatccgacagagggagcgctgctcaccgcggcaagaaaaggcggtttttcaaaggagtttgttgaatcaaactaccgggtggtcgaagaatttccgtttgattctgcacggaaaatgatgactgtcatcgtagaggatcaagacagaaagcgctatatcattacaaaaggtgcaccggatgtactgatgcagcgatcttcccgtatttattatgacggctcagcggctcttttttcaaatgaaagaaaagcagaaacagaggcggtattaagacatttggcatcacaggcgctcagaacgatagcggtcgcctacaggccgataaaagcaggcgaaacaccgtcaatggagcaggcggaaaaagatctgaccatgcttggcctttcaggtatcattgaccccccgcggccggaagtcagacaggcgataaaagaatgccgtgaagcaggaattaagaccgttatgattacaggtgatcatgtagaaaccgctaaagcgatagcgaaagacttgcgcctccttccgaaaagcggcaaaatcatggacggcaagatgctgaatgaactttctgaagaagagctttctcatgtggtggaggatgtatatgtatttgcccgcgtttcccctgaacataaactaaaaattgtaaaagcctatcaggagaacgggcatattgtggcgatgacgggagacggcgtcaatgatgctcctgccattaaacaagctgatatcggcgtctctatgggcattaccgggacagatgtggccaaagaagcatcatctcttgttctcgtggatgataattttgcgacgattaaatcagcgataaaagaaggcaggaacatctacgaaaatatcaggaagtttatcagatacctgttggcgtctaacgtcggagaaattcttgtcatgctgtttgcgatgctgctggcccttcctttaccgctcgttccgattcagattttgtgggtcaacttggtgacggacggattgccggcgatggcgctcggcatggatcagccggaaggagacgtcatgaagcgcaagccccgtcatccgaaagaaggggtatttgcccgcaagctaggatggaaggtcgtttccagaggatttttaatcggagttgccactattttagcgtttatcattgtgtaccaccgcaatccggaaaacttggcttatgcccagacgatcgcgtttgccacattggtgctcgctcagcttattcacgtgtttgactgccgcagcgaaacttctgttttctctagaaatccgtttcaaaacctgtatttaatcggcgcggtattgtcatccattttgctgatgcttgtagtaatctactatccgccgcttcagccgattttccatactgtagccatcacgccgggggactggatgctcgtcatcggtatgtccgccatccctacttttttgctggcggggtcacttttaacaagaaaaaaataaattcatatgatataatcttaggggtaatagcgtgtctattgcccttttattatgagaacagggaagaattgggtgttttaaaatgatacgaagtatgacaggcttcggcagtgcaagcaaaacacaagacgatctctctgtaagcgttgaacttaaatctgtgaactacagatttaaagaagtgaacgctcgtttgccaaggcctttgctatattttgaagataagctgaaacagaccattctgcagcatattcagcgcggaagaattgagcttttcgtatccgttgacagcgatatgcttgttgagaaaaggcttgaaattgattggccgctgctcgatgagtttgtcgcagccgcgagaggtatgaagaaacggtatcaattgtctgcagagcccgatgtaatggatttctttaagcttgatcatgtcgtccaggttcatgaagaacagacgcaaaatgacaagctggaggcgttgatcatcgatgctgcagaagaagcggtaaaaggtctctgtgaaatgcgtgaaaaagaggggctgctcttagcgaaagactgcctgatgcatattgatcagcttgaagagctggtgagagaaactgaattgctggctgcagatgtcgtatctcgttaccgggaacggctgtacgccagaatcaaagaatggactgaagacgtattagacgagagccggcttgtaacagaatgcgctatttttgcagaccgctctgatatcactgaagagattacaaggctgaagagccacttcgcccagtttcgtgatatattagctagtggcggagctgtcgggcgcaaactcgactttcttgttcaggagctcaatcgggaagcaaatacgattggctcaaaagcaaatgatcatcagatcacaaagcttgtcgttgaaatgaaaagttctattgaaaaaataaaagaacaagtgcaaaatatagaatagtgactgtgcgtattgtttacagacggtcttactaggctaaactagagacgtctattttacagggggaacgtagaagatgacgattaaactgattaatatcggatttggcaatatcatctccgccaatcggatgatttcgattgtcagcccggagtctgcgccaatcaaacggatgattcaggatgcaagagaccgcggaatgctaattgacgctacatacggacgaagaacccgtgcagttgtcgtcatggatagtgatcacattatcttatctgccgtccagcctgagacagttgcacacagactttctgttaaagaagaaattatggatgaagggcaggggtaattgccgcatgaaagaaagagggttattaatcgttctctcaggtccctcaggagttggtaaaggaacggttcgacaagcgatcttttcgcaggaagacacaaaatttgaatattcgatttcagtaaccacaagaagtccaagagagggcgaagtgaacggagtcgattattttttcaaaacaagagacgaattcgagcaaatgattgcggacaacaagctgcttgaatgggcagagtatgtcggcaattattacggcacgccagtcgattatgttgaacagacgcttcaagatggaaaagacgtctttttagaaattgaagttcaaggggctcttcaagtgagaaatgctttcccggaaggcctatttattttccttgcgcctccaagcctttctgaactgaaaaacagaatcgtgacacgaggcacagaaacagacgctctgattgaaaatcgaatgaaagccgcaaaagctgagatcgaaatgatggatgcttatgactatgtcgttgaaaacgataatgtcgaaacggcttgcgataaaatcaaagcaatcgttcttgctgaacatttgaagcgtgaacgcgttgcaccaagatataagaaaatgctggaggttgaataatcaatgttagatccgtcaattgattctttaatgaataaattagattcaaaatatacgctggtgactgtttctgcgagacgcgcacgtgaaatgcaaatcaaaaaagaccaaatgattgaacatacgatttcacacaaatatgtaggcaaagctttagaagaaattgatgcaggcctgctttcgtttgaaaaggaagaccgcgaatagtagcacaagtagcaacctatatcagatgtaggttgttatttttttccgtgcggttttgtaaagtgcagagggggagaattcattgctaaacaatcgaaatgtgttactttgcgtgagcggaggcatcgctgtttataaagcctgtgcgttaacgagcaagctggttcaggcaggagcaaatgtcaaagtgattatgactgaatccgcttgccgattcgtttcaccgctgacatttcaggcattgagccgccacgaagtctatacagatacatttaaagaacaaaatccaagcgttatttctcatattgatgccgcagactgggccgacttgattattgtagcgccggctacggctaatgtgattggaaaactggcaaacggcatcgctgatgatatgctgacgacaacattgttggcagcaacggctcccgtttggatcgcgccggcgatgaacgttcatatgtatgaccacccggcagtcaaacgaaacatttctgttctttatcaggacggttatcgttttattgagccaagtgagggctatttagcatgcggttacgtaggaaaaggcagattggaagagccggaaaacatcgtaaagctggccgaaaaacattttgctgaagaaacatccgctcctttagaaggcaagcatgtggtcattacagccggtccaacgcgggaagcgattgatcctgtccggttttttaccaataaatcgacgggcaaaatgggctacgcactagcggaggctgctgttcagctcggcgcacgggtaaccttaatttctgggcctgtttcacttgatcagcctaaaggccttgctgagtttatccctgttcaatcggctgcggatatgcgcgaagctgtgctctctgtgtatgacgcaagcgatatagtcattaaaacagctgcggtagccgattttacgccgaaaacagtatttgaccataaaatgaaaaaacaagacggcggcatgaccttagaactgaaaagaacagtcgatattttgaaagaattgggcgagaaaaagaaagagcagattttggtcggatttgccgccgaaacacaagacattgaacactatgcacgtaaaaagctcgccgctaaaaaccttgatttgattgtggcaaatgatgtgaaagcaaatggggccggttttggtgctgatacgaatatcgtgacaatctttttcaaagacgggcataaacgcgaactcccgatcatgtctaagctcgatgtttcttttgaggtccttcaggagatcgcagccctctcaaaacaaaccggagagcgctcatgaattttgcagaagtcatcgttgatgtcagcaccaaaaatatagacaggccttttgattataaaatcccagaccatctcaagggcatgatcaaaacggggatgcgggtcattgttccgtttggcccccgtaagattcaagggtttgtgacagcagtcaaagaagcatctgacctatcgggaaaatctgtcaaggaagtagaggatttattagatcttacacctgttctgacagaggagcttatgattctgtcatcatggctgtcagacaaaacgctgtcttttaaaataacggcgcttcaagcaatgctgcctgccgccttaaaggcgaaatatgaaaaagaattaaaaattgcacacggagccgatcttccgccgcaagtggaacggctgttttctgaaacaaagacgctgctgtattcagatatacccgatcatgagacgctgaaactgattcaaaggcatgttcaaaaaggggacattgacgtgacgtataaagtcgcgcaaaaaaccaataaaaaaatggtcaggcatattcaggcaaatgcgagtaaagaagagcttgctaagcaggctgagggattgtcccgccaagcagcaaaacagcaggcgattcttcactttctcatctctgagccggaaggtgtgaaaattcctgcggcggaattgtgcaaaaaaacggatacgagctctgcaaccattaaaacccttatccaaaaagggcttttgaaggaaagctatgaagaggtttacagagatccctatcaggacaaaatgttcaaaaaaacagagcccctgccgctgacagacgaacagagggctgccttcgagcccatacgcgagacattggacagcgatgagcataaagtgttcctccttcacggcgtgacaggaagcggaaaaaccgaaatttatctgcaatcaattgaaaaagtactggcgaaaggaaaagaagccatcgtcctcgtaccggaaatatcgctgacgccgcaaatggtcaaccgcttcaagggccgcttcggctcccaggtggcagtcatgcacagcggtttatccacaggagaaaaatatgacgagtggcgtaaaatccaccggaaggaagtacggcttgtcgtcggtgccagatccgccatttttgctccgtttgaaaatctcggaatgataatcatcgatgaagagcacgagtcttcctataaacaggaagaaatgccgcgctatcatgcgaaagaggtggcaatcaagcgggctgagcatcacagctgcccggttgtattagggagtgctacgccgacattagaatcatatgctagagcgcaaaagggcgtatacgagcttctttcactgaagcaccgtgttaaccatcgggtgatgcccgaggtttcgcttgtcgatatgagagaggagcttagaaacggcaatcgctcgatgttttcagttgaattgatggaaaagcttgaagaaacgattgccaagggtgagcaggcggtgctgtttttaaataagaggggctactcttcctttgtgatgtgcagggattgcggctatgtcccgcaatgcccgcactgcgacatttccatgacgtatcatcgttacggccaaaggctgaaatgccattattgcggacatgaagagcctgttccgcacacttgtcctgaatgcgcaagcgagcatatccgctttttcggaacgggaacacagcgagtggaggaagagctgacaaaagtgctgccaagtgcgagagtgattcggatggatgttgacacgacatcacggaaaggcgcccatgaaaaattactgtcagctttcggagaaggaaaagcggatattcttctcggaacgcaaatgatcgcgaaagggcttgattttccgaatgtcacgcttgtcggagtgttaagtgctgatacaacacttcatattcctgatttcagatcggctgaaaaaacatttcagctgttaacgcaagtcagcggccgggcaggcaggcatgaaaagcccggccatgtcatcattcaaacgtatacaccgtctcattacagtatccagctgacgaaaacacacgattatgaaacgttctatcagcatgaaatggcgcacaggagagagcaatcctatccgccatactactatttggctcttgtgactgtttctcatgaggaagtggcgaaagcagcggttacagctgaaaaaatcgctcattttttgaaagcaaactgcggagctgacacgaaaattctcggaccaagcgcgtcgccgatagccaggatcaaagatagatatcgctatcaatgcgtgataaaatacaaacaggaaacccagttatccgctttattgaagaagatactggaacattataaacgcgaaattgaacaaaaacatgtaatgatttcaattgatatgaatccttatatgatgatgtaagatctcacgtcttggagggtaacaaattggcagtaaaaaaggtcgtcacacatcctgcggaggttttggaaacacctgcggaaaccgtgactgtttttgataaaaagctaaaaaaactgcttgatgatatgtacgacaccatgcttgaaatggatggtgtcggactggcagcgccgcaaatcggcattttaaaaagagcggccgtcgtagatatcggggatgacagagggagaattgatctcgttaatcctgaaattttagaaaaaagcggcgagcaaaccggaattgaaggatgcttgagctttcctaacgtctatggtgatgtcacacgtgccgattatgtcaaagtgcgtgcgtttaaccgtcagggaaaaccgttcattctggaagcgcgaggctttttagcaagagccgtgcagcatgaaatggaccacttagacggtgtgctgtttacatctaaaataagtaaatactatacagaagatgaactagcggatatggaaggatgatttgatgacgagaatcgtatttatgggaacgccggatttttcagttcctgttttaagaaccctgatagaggacggatatgaagtagtgggggtcgtcacacagccggaccgtccgaagggcagaaaaaaagtactgacacctcctccggtaaaggaagaggcattgcgccacggcatcccggttcttcagccggaaaaagtcagattgacagaagaaattgaaaaagtgctggcattaaagcctgacctgattgtaacggcggcattcggacaaattttgcctaaagagcttctcgacagtccaaaatacggctgcattaacgttcacgcatcccttttgccggaactgcgcggcggtgctccgatccattattccattctgcagggaaagaagaaaaccgggattaccattatgtatatggtagaaaaattggatgcgggcgatatgatctcaaaagtggaagtggacattgaagaaaccgacaatgtcggaacactgcacgataaattaagcgttgctggcgcgaagctattgtctgaaacggttccaaacgttattgccggcagcatatcacctgaaaagcaggatgaagagaaagcgacgtacgcgcctaacattaaaagagagcaagagctgctcgactggtccagaacgggcgaagagctttacaaccagatccgcggcttaaatccatggcctgttgcttatacgactctaaacggacaaaacttgaaaatatgggcgtcgaaaaaaatagcggcaccaacaacagctgagcccggcacagtcgttgcagttgaaaaggaaggaattatcgttgcctcaggtaacgagacggctctgttattaaccgaactccagccggcaggcaaaaaacgaatgaaaggcgaagactttgtgcgaggcgctcatgttgaagccggtgatgtgttaggagtaaacaatgaaaaaaactagtgttcgtgacatcgcccttgaggcgctgatcaaattagaacaaaaccaggcatacagcaacctgctgctgaaatcggtcattaaatcaaatgaactgagtgatcaggacagagggcttttgactgaacttgtctatggtacattacaaaataagatcgcgcttgattatatgcttaaaccgtttatcaataagcctcaaaaggtaaagccgtgggtgattcagcttcttcgcctatccttatatcaaatggagtatttggagaagattccagacagggcagccattcatgaagcggttgagattgctaaaatccgtggacacaaaggcattgcttcatttgtcaacggcgtgctccgttctattcagcgcgaaggtgttccatcctttgacgcgatcgaagatcctgtccgccggctggcgacagaaacaagccatccggaatggcttgtgaaagagtgggcggatgcgtatggatttgaagctgcggaaaagatttgccgcatccatctcattccgccgaaacagacgctgcgtgtcaatcaaatgaaagcagacagagctgagctgcttgaccaaatggctgctgagggaatcgaagttgaaaaaagcgacctcgctgaagatgctgtgaagctcttaaagggaacaattgccggaactcatttcttccaaaacggcgaagtttctatccaggatgagagctccatgctcgtcgcccgcgcccttgatcctaagtcagatgaaacagtgcttgacgcgtgtgcggcgcctggcggaaaatcggctcatatcgcagaattaatgaagaacaaggggagcgttacgtcgcttgatcttcacaaacataaagtgaagctgatcaaagaagcggcagatcggcttggcctgacaatcattcatgcggaaacaatggatgctagaaaagcgggggaaacgtttgaaaacgaacagtttgaccgaatattggtcgatgccccgtgctcaggtttcggtgttatcagaagaaagccggacatgaaatacacgaaaaaacctgacgacagcgcccgtctagctgaaatccagctgtcgatcttgagggaaatcgcaccattagtaaaaaaaggtggcactcttgtctacagtacgtgtacaatggaccggacagaaaatgatgaagtaatacatgcgtttatacaagaacatcctgattttgaacccgatttgtctcttgaaaagcggctgcctgaaaaggtgagaccctttgttcgggatggaaggcttcaaatccttcctcattatttcggaacagatggtttctttatttgcagcatgagaaagaagggataagcaatggcagaacttaataaaacaaaagtaagaaaagaattgcggacagagcgtccgtctatttattcttttgaattagatgaaatcaaacaatggctgacagacaatggagagaaaccgttccgtgcagcccagatctttgaatggctatatgaaaaacgcgtatcttcttttgaagatatgacaaacctctcaaaggatctgcgtgagaaattaaacactcactttgtgttaacaacgctgaaaacggctgttaaacaaacctctcaagacggtacgatgaagtttttgtttgagcttcatgacggttataccatcgaaaccgttttaatgagacacgagtatggcaattctgtatgtgtaacgacacaagtcggctgccgtattggctgcacattctgcgcgtcaacgcttggaggcttaaaacgaaaccttgaagcaggggaaattgtcgctcaagtagtcaaagtgcaaaaagctcttgatgaaacggatgaacgcgtcagctctgtcgtgatcatgggaatcggcgaaccttttgataactttaacgaaatgctcgctttcttgaaaatcattaaccatgacaagggcctgaatatcggtgctcgccatattacggtctctacgagtgggatcatcccgaaaatttacgaatttgctgatcagcaaatgcagattaactttgcaatttctctgcacgcgccgaacacagaaatcagaagccgtttgatgccgattaacagagcatataaactgcctgatctaatggaagccgttaaatattatattaataaaacgggacgccgcatcagctttgaatacgggctgttcggaggcgtaaacgaccaggtggaacacgccgaagagcttgccgacttgctggaaggagtcaaatgccacgtgaacttgattccggtaaactacgtgcctgaacgggactatgtgcgcacaccgcgtgatcagatttttgcttttgaaaaaacgctgaaatcccgcggagtaaatgtcacaatccgaagagagcaaggacatgacattgacgcagcctgcggtcagcttcgcgcgaaggagcgtcaagacgagacgaggtgatgagggttgttaacagccttaaaaacagatacaggaaaaatccgccagcataatgaagatgatgcggggatattcaaggggaaagatgaatttatattagcggttgtcgctgatggcatgggcggccatcttgctggagatgttgcgagcaagatggctgtgaaagccatgggggagaaatggaatgaagcagagactattccaactgcgccctcggaatgtgaaaaatggctcattgaacagattctttcggtaaacagcaaaatatacgatcacgctcaagcccacgaagaatgccaaggcatggggacgacgattgtatgtgcgctttttacggggaaaacggtttctgttgcccatatcggagacagcagatgctatttgcttcaggacgatgatttcgttcaagtgacagaagaccattcgcttgtaaatgaactggttcgcactggagagatttccagagaagacgctgaacatcatccgcgaaaaaatgtgttgacgaaggcgcttggaacagaccagtcagtcagcattgacacccgttcctttgatatagaacccggagacaaactgcttctatgttctgacggactgacgaataaagtggaaggcactgagttaaaagacatcctgcaaagcgattcagctcctcaggaaaaagtaaacctgcttgtggacaaagccaatcagaatggcggagaagacaacataacagcagttttgcttgagcttgctttacaagttgaagagggtgaagatcagtgctaatcggcaagcggatcagcgggcgttaccaaattctccgcgttataggcggcgggggaatggccaacgtgtatttagctgaggatatcattctagaccgtgaagtcgcaattaaaatcctgcggtttgactatgcaaatgacaatgaatttatcaggcgtttccgcagagaagcccaatccgcatcaagcctcgatcacccgaatattgtcagcatttatgatttgggcgaggaagatgatatttattatattgtcatggaatacgttgaaggcatgacgcttaaagaatacataacagcaaatgggccgcttcaccctaaagaagcgctgaacatcatggagcaaattgtctcagccatcgctcatgcccatcaaaaccagattgttcacagagacatcaagccgcataacattttgattgatcatatgggaaatatcaaagtaacggattttggaattgcgacggcactaagttcgaccacaatcacccataccaattcagttctgggctcggtccattacttatcacctgaacaggcccggggcggcttagccacaaaaaaatcggatatttatgcgcttggaatcgttctatttgagcttttaaccggccgtattccgtttgatggagagtcagcagtcagcatcgccttgaagcatcttcaagcggaaactccttcggcaaaaaggtggaatccatcggtcccccaaagcgttgaaaacatcatactcaaggcaactgccaaagatccttttcatcgctacgaaacggctgaagacatggaagcagacataaaaacagcttttgatgccgacagactcaatgaaaagagatttacgattcaagaagatgaagaaatgacaaaagcgatacctatcattaaagatgaagaacttgctaaagctgctggcgaaaaagaagctgaagtgacaaccgcacaagaaaacaaaacaaagaagaacggcaaaagaaaaaagtggccgtgggttttgctcacgatatgcctcgtttttatcacagctggaattcttgctgtcactgtttttccgtcgcttttcatgcctaaggatgtcaaaatacctgatgtctccggaatggaatacgaaaaagccgcagggctcttggaaaaagaaggtttacaggttgattccgaggtgttggaaatctcagatgaaaaaattgaagagggcctgatggtaaaaacggatcctaaagcggataccacagtcaaagaaggcgccacggtcaccctttataagagcaccggaaaagcaaaaacggagatcggtgatgtgacaggccaaacggtcgaccaggcaaaaaaagcgttgaaggaccaagggtttaaacatgtaacggtaaatgaagtgaatgacgagaaaaacgcgggcactgtcattgaccaaaatccttcagcagggactgagcttgtcccgagtgaagatcaagtcaaacttacagtcagtatcggacccgaagacattacgcttagagacttgaaaacctacagtaaagaagcagcgtctggatatctggaagacaacggattgaagcttgtagaaaaagaagcatactcagatgatgttccagaaggacaggttgtcaaacaaaaaccagcagcaggtacggcagtaaagccgggaaacgaagttgaagtgacattctctctcggaccagagaaaaaacctgcgaaaacagtgaaagaaaaggtcaagatcccctacgaaccagaaaatgaaggggacgagcttcaagtgcaaatcgcggttgacgatgcggatcacagcatctctgacacttacgaagaatttaagataaaagagccgactgaacgaacgatcgaactaaagattgaacccggccaaaaagggtactatcaagtaatggtaaacaataaagttgtcagctacaaaaccattgagtatccaaaagatgaataacaaggagggaaaatatgcctgagggcaaaattattaaggcgctaagcggcttttactatgtactggatgaatcagaggattcagataaagtaatacaatgcagaggaagaggcattttcagaaaaaacaaaattacccctcttgtcggtgattacgttgtgtatcaagctgaaaatgacaaagaaggatatctaatggaaattaaagaaagaaccaacgagcttatcaggccgccaatttgcaacgttgatcaagcggtcctggttttctcagcggttcagccttctttcagcacggcattgctcgaccgcttcctggttctcgttgaggccaatgatattcagccgattatatgcattactaaaatggatctgattgaagatcaagatacagaagatacgatacaagcctatgcagaagactatcggaatattggttatgacgtataccttacctcctctaaggaccaagacagtttaacggacatcatcccgcattttcaggataaaacaacggtatttgccggtcagtccggtgttgggaaatcctcgcttctcaacgcgatcagtccggagcttggattaagaacaaacgagatttctgagcatttgggccgcgggaaacacacaacccgccacgtggagctgattcatacgtccggaggtttggttgcagatacaccaggattcagctcgcttgaatttacagacattgaggaagaagagctgggctataccttccctgatatcagagaaaaaagctcttcatgcaaatttagaggctgtttacatctgaaagagccgaaatgcgcggtgaaacaagctgttgaagacggagaattaaagcagtatcgctatgaccattatgttgaatttatgacggagattaaagacagaaagccgaggtattagcataatgataaaggttgcaccatctattctttccgctgattttgccgctttaggcaatgagattaaagatgtagaaaaaggcggagccgattgtattcatattgatgttatggacggccgttttgtcccgaatatcacaatcggtccgctgattgtagaagcggtccggccggtaacggatctgccgcttgatgtccatttaatgatagaagagccggatcgttatatcccggcttttgcgaaagcaggcgcagatatcctgtctgtgcatgctgaggcatgtccgcacctgcaccgtaccatccagctcattaaagagcaaggagtgaaggccggagtagttctaaacccgcatacccctgtacaagtcatcgaacatgttttcgacgatcttgatcttgttcttttaatgacggtgaacccgggcttcggcgggcagaaatttattcattcagtccttcctaaaataaaagaggttaagcgaatggcggatgaaaaaggaaaaaaagatctgttcattgaagtagacggcggcgtcaacaaagaaaccgctccgctcgtcattgaagcgggcgcaaatttactcgttgccggttcagctgtttatggccagtctgaccgcaaaaaagcaatttctgaaatcagaggaagtaaataagcagctttagaaaagagctgggcatacaatagcctaagctctttttcctgtatgcagagaaaggaatcagagatgaaaacaattaatatcgttgcgggaggcccgaaaaatctcattcccgatctaaccggctatacggatgaacacacgctttggatcggtgttgacaaaggcaccgtcactctcttagatgccgggatcattcctgttgaagccttcggagattttgacagcataacggagcaagaacgccggcgaatagaaaaagccgctcccgcccttcatgtgtatcaagcagaaaaagatcaaacagatttagacctcgcccttgattgggcgctggaaaagcagccggatattattcagattttcggcattacaggcggcagagctgatcattttttaggaaacattcagctactgtatagaggtgtaaaaacgaacataaaaattaggctgatagacaaacaaaatcatattcaaatgttccctcctggtgaatatgatattgagaaggatgaaaataagcgatatatctccttcataccgttttccgaagacatacatgagctgaccctgaccggttttaaatatcctctaaataattgtcatattacgctcggttcaacactatgtattagtaacgaactcattcattcacgaggtactttttcgtttgcaaaaggcatattaataatgataagaagcacggattaagcatgtgctttcattcaattgctaaaaacaatgaacaaggcggttacgggacgttataggaggggacaaaaatgaaattttacaccattaaattgccgaagtttttaggaggaattgtccgggcgatgctgggctcatttagaaaagattaatgcccaggggttcaaagccctctttcaccacataaaaacgcctgccacatatcggggcaggcgttcattttgttatacacgctcaactttaccggatttcaaagctcgagcagatacatatacttttttaggttttccgttcacaaggatacgaaccttttgaagattcgcgccccaagtgcgcttagaagcgttcattgcgtgagaacggttattcccagctgttgtttttttacctgtgataacgcatttacgtgccatttgtttccctcctcacttgcacaaaacatctactttttaacattcatataatcttagatgctttcgatatggatactttaaataatttaccacagctaaaaaacgtttgcaactattgtttcatcatctttcaagaaaattcacttgacatcttgcggaaacagcagcgctatagtatatgtagaggtacggccagcgattattgcctggtcttttcataatggaaaccatatagtagaatagctgtaactctatgcattcgaaggaggaactagtgtgtccattgaattaagaacgaagtacggacagattgatatatctaatgaagtcatcgcgatggttgcaggaggcgcggcggttgactgttacggcattgtcggtatggcctctaaaaaccagattaaagacggactgactgaaatccttcggaaagagaatttcagcaggggtgtccaagttcgccaagaaggagaacagatacatatcgacatgtatatcattgtcagctacggcacgaaaatttctgaagtggcacataatgtccaaacaaaagtaaagtacacagtaaatcaaaccatcggactggcagtggattctgtcaatatttatgtccaaggcgtacgagtgacgaacccgtagttaggaggagtaggattgtctatcagaacattagacggcagaacctttgccgagatgattcttgcgggagcgcagaatctgtctcaaaacgccagtgcagttgatgcactgaacgtgtttccggtgccggacggtgatacgggaacaaatatgaacctgtcgatgacttccggagcaagagaagttgaacaaatggatacggatgatatcgggaaggtgggctccgcgttatctaaagggctgctcatgggagcacgcggaaattcaggagttatcctatcccaattgttccgcggatttagcaaaagcattgaaacgaaaaaagaaattaatgcacttgagtttgccgctgcgctgcaagcaggtgtagacatggcgtataaagctgtcatgaaacctgtagagggcaccattttaacagttgcaaaagacgctgcaaaaaaagcgatgatcttagcagaaaaagaaaccgatatcactgcgctgatgattgcagtgacagaagaagcagaggcgtctttaaaccgcacccctgaattgctacctgtcctaaaggaagtaggagttgtcgatagcgggggcaaaggcctgctctgtgtgtatgaaggtttccttgcttcattaaaaggtgaaactgtacctcagaaagcagttcttccgtcacttgacgacatggtcagcgcagagcatcacaagagcgcgcaaagcatgatgaataccgaagatattgaatttggattctgtaccgaagtgatggttaggcttgatcagacaaaaagagagttcgacgaaggcacgttcaggcaagacctcagccagttcggagattctctgcttgtgattgcggatgaatcgctggcgaaggttcatattcatgctgaagagccgggaaacgtgttaaactacgcccagcattacggtgaattgatcaaaataaaaatagaaaatatgagagaacagcatacctctatcatcagtcaagaaagcaaacctgcagacaacgaaataccgccggcaaagcagccgtatggcattgtgactgtggcgatgggagaaggaatttcagacctattcaaaagcattggcgcttctgttgtgattgaaggcggccagaccatgaacccaagcactgaggatattgttgatgccgtgaagtctgtaaatgcagatacggtatttatcctgcctaacaactccaacattatcatggctgctaaccaagcggccagcgtagtggatgaacaggtttttgtcattcctgctaaaacggttccgcaagggatgtcagccctgctggcttttaacccggatcaagaagctgaagcgaacgaggccaatatgctaagcgccattcagcaagtaaaaagcggacaggtgacgttctcagtcagagatactcatattgacggtaaagatattaaaaaaggcgactttatgggcattctgaatggaacgattatcggcacttctgaaaatcagctgtcagccgcgaaaatgctgctgtcagaaatgatcggagaagatgatgaaatcgtgaccattctatatggtgaggatgcgtctcaggaagaagctgagcagcttgaagcgtttctcagtgaaaagtacgaggagattgaggttgagatccacaatgggaaacagcctctgtattcgtatatagtttctgcagaatagaagggcaatttgcccttctattcttatgtctgcttttaagtgcggcagcgctgtaacgcgcccgcttgccattttatatctgatcaattagtctagaagcaaagcgctaataagctctggttcataaggaggaatagcatgaaatacagaagcgtttttgatattatcggcccggttatgatcggtccgtccagctctcatacagcgggagctgctagaatcgggagagtggccagaagtttatttggcagagagcctgagcgcatcattgtatctttttacggctcgtttgcggaaacgtataagggccacggcacagatgtcgcgattatcggcggattgcttgattttgatacattcgatgaacggattaaaaccgctatacaaattgcagaagctaaaggaattgatatagagtttcgggtagaagacgcagtcccggtccatccgaacacagcaaaaatcaccatttctgatgaaaagggtgagcttgaactgacgggtatttcgattggcggaggaaagattgaaatcacagaattgaatggttttgagctccggctgtcaggaaatcatccggccatattagttgttcataatgacaagtttggcacaattgccggtgttgccaatgttctggcgaaattttcaatcaacgtaggacatatggaagtagcccggaaagatatcggccagcttgcgctgatgacaatagaggtcgaccaaaatattgacgaccacattctcgacgagctgtcgaaactgccgaatattattcaagtgacaaagattgctgactagcgaaaagggtcaggaggagccagttatgtttcgtaatgtaaaagaattaattgagattactaaagaaaaacaaatattgatctctgatgtgatgatagctcaagagatggaagtaacagaaaaaacaaaagaggacatttttcagcagatggatcataacctgtctgttatggaagcggcggttcagaaaggactcgagggagttacgagccaaacgggcttaacaggcggagatgccgttaaattgcaggcctatattcgatcaggaaaaagcctgtctggcccgctgattttagatgctgtatcgaaagccgttgcaacaaatgaagtaaatgcagccatgggaaccatctgtgcgacaccgactgcaggttctgccggtgtggtgcccggtacgttatttgctgtaaaagaaaagctgaatccaacaagagaacaaatgatccgctttttgtttacagccggggctttcggatttgtcgtggccaataacgcaagcatttccggcgccgccggaggatgtcaggcagaggttggatcagcttcaggcatggcggctgcggctattgttgaaatggcaggaggaacacccgaacaaagcgcggaagccatggccattacattaaaaaatatgctaggcctcgtgtgcgaccctgttgcagggcttgttgaggtgccttgcgtgaaacggaatgcgatgggcgcgtcaaatgcaatgattgccgctgatatggcattggcgggcattacaagccgtattccatgtgatgaggttatcgatgccatgtataaaataggccaaacgatgccaactgcacttagagaaacaggccagggcggtttagcggcaacaccgacaggaagagaattagagaaaaaaattttcggaggagcgctaggttcacgtgaaacaacatcagcaaactagtatagctaacattaagggtattgggccggaaacagaaaaaacattacacgaactcggtatttatgacatttctgatcttctgaattatttcccttatcgctatgatgactacgagctgagggatttagaagaagtaaagcatgatgaaagagtcacagtcgaagggaaggttcattcagagccttctcttacctattacggaaaaaaacgaaacaggctgacattcaggcttctggtcggccactatttaatcacagccgtatgttttaaccggccttatttgaagaagaagctttcgctcggctctgtggtgacggtttcaggtaaatgggacaagcaccgccaaaacatctctgttcaggagttgaaaaacgggccgcatcaagaagacaaaagcattgaaccagtgtattctgtgaaagaaaatgttaccgtcaaaatgatgaggcgctttattcagcaggcgctgacccaatatgcagactcacttcctgatcctcttccggaaaagctaagaaaaagctataaactgcctgactattatcaagcgttaaaagcaatgcaccagcctgaaacaagggaagcattaaagcttgccagacggcggtttgtttatgaagaatttttgttgtttcagttgaaaatgcaggcgttccgaaaggcggaaagagagcagacacaagggatacggcagcgtttttcaaacgaagaactcatgagatttatcaaaagcctcccgtttcccctcacaaacgcccagtcacgcgttcttcgcgaaataacagcagacatgtcttctccatacagaatgaaccgccttcttcaaggggacgttggatcaggaaaaacggcagtcgccgccattgcactgtatgccgcgatcctatccggataccaaggagcgctcatggtgccgacagaaattctggccgagcagcatgctgattcgctcgtttcgctatttgaaaaatgggacgtcagcgttgctcttttgacaagctctgttaaagggaagcggcgaaaagaactgcttgagcgtcttgcggcgggtgagattgatattcttgtaggaacccacgctttaatccaagacgaggtggagtttaaggcgctgagtctcgttattacagatgaacagcacagatttggagttgagcagcgcaaaaagcttcggaacaaagggcaggatcccgatgttctctttatgacagccactccaatcccaagaacattagcgatcacagtgttcggtgaaatggatgtatctgtcattgatgagatgccggctggacgaaagagaatcgagacctattgggtaaaacatgacatgctggatcgtatattggcatttgtcgaaaaagaattaaagcaaggcaggcaggcttatatcatctgtccgctgattgaagaatcagacaagcttgatgtgcaaaacgctattgacgtgtacaatatgctttctgatatttttcggggaaaatggaatgtcggccttatgcatggaaagctgcattccgatgaaaaagaccaggtcatgagagaattcagcgcaaatcactgtcaaattctcgtatcaaccactgttgtggaggttggcgtgaatgttccgaatgcaacgattatggtgatttatgacgccgaccgttttgggctatcacagcttcaccagctgcgcggccgtgttggacggggtgagcatcaatctttctgtattctgatggctgatccaaaatcagaaacagggaaagaacggatgaggatcatgtcggaaaccaatgacggtttcgagctgtctgaaaaggatctggaactgagaggtcccggtgatttcttcgggaaaaaacaaagcggaatgccggaatttaaagtggcggacatggttcatgattacagagcgcttgaaacggcaaggcaggatgctgcgaatcttgtggcttctgacgcgttctggaaggagccggaatacgctgtgttaagagatgaattgctgaagagcggagtaatggacggggaaaaattaagctgagtatcagaagtttttggtgttcagccagaaacaatcgttgcattccaatctatgaaattatatactactattagtacctagtcttaattgtccggatggtgtttagatatgagaagaaataagagagaacgccaggaattacttcagcagacgattcaagcaaccccctttattacagatgaagaactagcgggtaaattcggggtgagcatccagacgatacgtttggaccgcttagagctttccatacctgaactgagagaaagaattaagaacgtggcagagaaaacacttgaggacgaagtgaagtccctgtcacttgatgaagttatcggagaaattattgaccttgagctggatgatcaggcgatatccattttagaaataaaacaggagcacgtgttcagccggaatcagattgcgagaggacaccatttatttgcacaggcgaattctttggccgttgcagtcattgatgacgagctggcgctgactgcaagtgcagacatccgctttacaagacaggtaaagcagggtgaacgtgtcgtagcaaaagcgaaagtgacggctgtcgaaaaaggaagaacggttgtcgaagtgaacagctacgttggcgaagaaattgttttttctggacgctttgacatgtatcgttcaaaacattcataaaggtggagcatgcatgagaatagctgtagatgcaatgggaggagaccacgctcccaaagctgttattgacggagttataaaaggtatagaggcatttgatgatctccatatcacacttgtcggtgacaaaacaacgatagaatcacatttaacaactacatcagatcgcatcacggtgctgcacgcagatgaagtgattgagcctacggatgaaccggtccgtgccgtgcgaagaaaaaagaactcatctatggttcttatggcgcaggaggttgcggaaaacagagctgacgcctgcatttcagcaggaaataccggtgcattaatgacagccggtctctttattgtcggaagaattaaaggaattgaccgtccggcgcttgccccgacacttccgactgtttcgggagacggatttcttctccttgatgtcggcgccaatgtcgatgccaaaccggagcacctcgttcaatatgccatcatgggttctgtttattctcagcaagtgcgcggtgtcacttcaccgagagtcggacttttaaatgtcggaacagaagataaaaaaggaaacgaactgacgaagcagacgttccaaattttaaaagaaacagcaaacatcaattttatcggaaacgtggaagcgcgagaccttttagatgatgtggcggatgttgtagtaacagacggctttaccgggaatgttacactcaaaacgctggaaggctctgcgttgtcaatttttaaaatgatgagagacgtaatgacgtctactttgacatccaagcttgcagcagctgtgctgaaaccaaaattgaaagaaatgaaaatgaaaatggagtattcgaattatggcggagcaagtctttttggcttaaaagcgcctgtgatcaaggcgcacggctcttcagattcaaatgctgtattccatgcgattcggcaagcaagagagatggtcagccaaaatgtggctgcgctcattcaggaagaagtgaaagaagaaaaaacagatgagtagtctggaggtttttacatcatgagtaagattgcatttttattcccgggtcagggatcacaatttatcggcatgggaaaagagctttatgagcaggtgcctgctgcaaagcgtctgtttgatgaagccgatgaaacgttggaaacaaaactcagctcgcttatttttgagggggatgctgaagaattaacacttacatacaatgcgcagcctgctttgcttacgacaagcatcgctgttcttgagaaatttaaagaatctggcattacacctgatttcacagcaggacacagccttggtgaatattctgcactggttgcggctggcgctctgtctttcaaagatgctgtttatactgtcagaaagcgcggagagtttatgaatgaagcggtgccggctggcgaaggagcaatggctgcgattctcggcatggatgctgaagcattaaagcaagtaaccgataaagtcacagaggaaggcaaccttgtacagcttgcgaatctcaactgtcctggccaaatcgtcatttccggaacagctaaaggggttgagcttgcatctgaactggcaaaagagaacggcgcaaaacgcgcaattccgcttgaagtaagcggtccgttccattctgaactgatgaaaccggctgctgaaaagctgaaagaggtattggacgcctgtgacataaaagacgctgccgttccggtcatctcaaatgtttctgctgacgtgatgactgaaaaagcagatatcaaagaaaaacttattgagcagctttactctccggttcgttttgaggaaagcattaacaagctgatcgcagagggtgttacgacttttattgaaatcggtcccggaaaagtgctttcaggccttgtgaaaaaagtgaatagacggttaaaaacaattgctgtatcagatccggaaacgatcgagctggcaattcaaacgcttaaggaggagaatgataatgcttaatgataaaacggctattgtcactggcgcatcccgcggaatcggccgctcaatcgcccttgatctggcaaaaagcggagcaaatgttgtcgtgaactactccggcaatgaagcgaaagcaaatgaagtggttgatgaaatcaaatcaatgggcagaaaagcaattgctgtcaaagcggatgtatcaaatcccgaagatgtacaaaacatgataaaagaaacattgtctgttttttctacgattgacattctggttaataatgcgggaattacaagagacaatctcatcatgagaatgaaagaagatgaatgggatgatgtcattaacattaacctgaagggtgttttcaactgcacgaaagctgttacaagacaaatgatgaaacagcgttcaggccgcattattaacgtatcgtctatcgtcggcgtcagcggaaaccctggacaagccaactacgtggctgcaaaagctggcgtcatcggtttaaccaagtcttctgctaaagagctcgccagccgaaatattacggtaaacgcaatagcgccaggatttatctcaactgatatgacagataaacttgcaaaagacgttcaagacgaaatgctgaaacaaattccgctcgcgcgctttggtgaacctagcgatgtcagcagtgttgtcacgttcctagcttcagagggagcccgttatatgacaggccaaacgcttcatattgacggcggaatggtgatgtaagttttttctcgaaaatttcatcgtagtttctctagttttttaaaaacgaatccactataatacttgaggggaggtgaattgctatggcagacacattagagcgtgtaacgaaaatcatcgtagatcgccttggcgttgatgaagcagacgtcaaacttgaagcttctttcaaggaagacttaggtgctgattccctagatgtagttgagcttgttatggaacttgaagacgagtttgatatggagatttctgacgaagatgctgaaaagattgcaacagtcggcgacgctgtgaactacatacaaaaccagcaataagctgatgctaaaagtcccgccgaaacgcggggctttagccctttattcgtgcagttattacagcatgccgcttttacgcgcgctgtatccggtttagtcagagaagcgcggtgaacctgatgtgcctatggaggttactatgtcaaaacactcacattataaagataaaaaaaagttctataaaaaagtagaacaatttaaagagtttcaagaacggatttcggttcactttcaaaatgaaaagcttttgtatcaagcatttacacattcatcttatgtgaatgagcatcggaaaaagccgtatgaagataatgaaaggcttgaatttttaggtgacgctgttttggaactgacgatctccagattcttatttgccaaatacccggctatgagtgaaggagatttgacgaaattgagagccgcaattgtttgcgaaccgtctctcgtttcattggctcacgagctgtcattcggcgatcttgtcctgttgggtaaaggcgaggaaatgacaggcggaagaaagcgtcctgctctattggcggatgtttttgaggcatttatcggagccttgtaccttgaccaaggattagagccggtcgaaagtttcttaaaagtttatgtgttccctaaaattaacgatggtgctttttctcatgtgatggatttcaaaagccagctgcaggaatacgtgcagcgggacggcaaaggctctctggagtataaaatctccaacgaaaaaggacctgcgcacaaccgtgaatttgaagccatcgtatctctaaaaggtgaaccactcggagtcggaaacggccgttcaaagaaagaagccgaacagcacgctgctcaggaagctttagctaaattgcaaaaacaccatacgaaacaataaaatcccccttatgactcagggggatttcagtatgtatgccgtcttatttgaccaatgtttatgatagaattgaaatacttattacataaggaggatcgctatgttcctcaaacgtttagacgttataggatttaaatcatttgcagaacggatttccgtagacttcgttaaaggcgtgacagcagttgtcgggccgaacggaagcggaaaaagcaacatcacggatgccattcgctgggttctcggcgaacaatcggcacgctctcttcgcggcggaaaaatggaagacatcatttttgccgggagtgattcaagaaagcgattaaatctagctgaagttacgcttactcttgataatgatgatcatttcttgccaattgacttccacgaggtgagtgtcacaagacgtgtgtacagatcaggtgagagtgagtttctgattaacaatcagccatgccgcttgaaagatattattgatttatttatggactctgggcttggtaaagaagcattttctattatcagccaagggaaagtggaagagatcctgagcagtaaagcggaggatcgccgcagtatctttgaagaagcggccggggtgcttaaatataaaacgagaaagaaaaaagcagaaaataaactgtttgagacacaggacaatctaaatcgggtagaagatatattacatgagcttgaagggcaggttgaacctcttaaaattcaagcttcaatagcgaaagactaccttgagaaaaagaaagagctggagcatgttgaaattgcgctgactgcctatgatatcgaagagctgcatggtaaatggtcgactcttaaagagaaagtgcagatggcaaaagaagaagagcttgctgaatcgtctgctatttctgcgaaagaagcaaagattgaggatacaagggacaaaatacaagcgcttgatgagtcagtagatgagctccagcaagttttactggtaactagtgaagagctggaaaagcttgaaggccgtaaagaagtcctgaaagaacgaaagaaaaacgctgtgcaaaaccaagaacagcttgaagaagccatcgttcagttccagcaaaaagaaacggttctgaaagaagagctttcgaagcaggaagctgtcttcgaaacgcttcaggctgaggtgaagcagttaagggcgcaagtaaaagaaaaacagcaggctctcagtcttcacaatgaaaatgtcgaagagaaaatcgagcagctgaaaagtgattattttgagctgttaaacagccaggcttcgatacgcaacgaactccagcttcttgatgaccagatgtcccaatccgctgtcacattgcagagactcgcggacaacaatgaaaagcacctgcaggaacggcgtgatatttctgcgcgtaaagccgcatgtgaaacggaatttgcccgaattgagcaggagattcacagtcaagtcggtgcatatcgtgatatgcagacaaaatatgagcagaaaaagcgccaatacgaaaaaaatgaatccgctctgtatcaggcataccaatacgttcagcaagcgagatcaaaaaaggacatgcttgagacgatgcagggagatttctccggcttttatcaaggtgttaaagaagtgctgaaagcgaaagagcgccttggcggaattcgcggagcggttcttgagctgatttctacagaacagaagtatgaaacggccattgaaatagcgctcggcgcttctgctcaacacgtcgtgaccgacgatgaacaatctgcccgaaaagcgattcaatatttaaagcagaattccttcggccgggcgacgtttctgcctctttctgttattagagaccgccagcttcaaagccgtgacgcggaaacagccgcccggcattcatcatttctcggggttgcaagtgaacttgtcacatttgatcctgcgtatcgaagcgtcatccagaatcttcttggaaccgttctgatcacagaggacttaaagggtgcaaacgagcttgcgaagcttctcgggcaccggtaccgcatcgtaacccttgagggagatgttgtgaaccccggtggttcaatgacgggcggcgcggttaaaaagaaaaataactccctcctcggaagaagccgggagctagaagatgtgacgaaacggctcgctgaaatggaagagaaaacagctctgcttgaacaagaggtcaaaacccttaaacaatccattcaggatatggagaaaaaactggctgacttaagagaaaccggggaaggcttaaggttaaagcagcaggatgtgaaaggccagctgtacgaacttcaagttgccgagaaaaatatcaatacccatttagagctctatgaccaagaaaaatctgctctgtcagaaagcgatgaagagaaaaaagcgcgcaaacgcaagcttgaagaagagctctctgccgtatctgaaaagatgaaacagcttgaagaggacatagacaaactgacaaaacaaaaacaaacgcaatcctcaacgaaagagtctctttccaacgagcttactgagctgaagatcgctgcggccaaaaaagagcaggcatgcaagggggaagaggacaaccttgccagattaaagaaagagctcactgaaacagagattgcgttaaaagaagcaaaagaagacttaagcttcttaacgtcagagatgtcatctagcaccagcggcgaagaaaagctggaagaagcagcaaaacataaattgagtgacaaaacgaaaacgatcgaactgattgcattaaggcgcgatcagcgcatcaagcttcagcatgggcttgatacgtatgagcgtgagctgaaagaaatgaaacgcctgtataaacaaaaaacaacgctcttaaaagacgaagaagtcaaactcggacgaatggaagtcgagcttgataatttactccaatatttacgggaggaatacagcttgtcctttgagggggcaaaagagaaatatcagcttgaaactgatccagaggaagccagaaagcgcgtgaagctgattaaactcgcaattgaagagctgggtaccgtgaacctcggaagcatagatgagtttgagagggtcaacgaacggtacaagtttctgtcggaacaaaaagaagatttaacagaagcgaaaaataccttgttccaagtgattgaagaaatggatgaagaaatgacgaagcgctttaacgacacattcgttcaaatccgctcacactttgatcaagtttttcgctccttattcggaggagggcgagctgaactgaggctcaccgatcctaacgatctgcttcattcaggagtcgagattatcgctcagccgccggggaaaaagctgcaaaacttaaacctcctgtcaggcggagagcgtgcgcttactgctatagcgctcttattctcaatcctaaaggttcgtccagtgccgttttgcgtccttgacgaagtagaggctgcgctcgacgaagcgaatgtgttccggtttgcgcagtatttaaaaaaatacagcagtgatacccagtttattgtgattacccacagaaaaggaacgatggaggaagcggatgtgctttatggcgtaaccatgcaggaatccggtgtttccaaggtaatctccgttaagctggaagaaacaaaagaattcgttcagtaacgaggaaagaggttaaaagatgagcttttttaaaaaattaaaagagaaaatcacaaaacagacagattccgtatctgaaaagtttaaggatggccttgaaaaaacaagaaactcctttcaaaacaaagtgaatgatcttgtatcccgttaccgtaaagtggatgaggatttcttcgaagagcttgaagaggttcttatcagcgcggatgtcggttttacaaccgttatggaattaatagatgagctgaaaaaagaagtcaaacgcagaaatattcaagatccaaaggaagtccagtcagtgatttctgagaaactggtcgagatttataacagcggagatgagcaaatttcagaactgaacatccaggatgggcgtttaaacgtaatccttctggtaggtgtaaacggtgtcgggaaaacaacaacgatcggaaagcttgctcataaaatgaaacaagaaggaaaatctgtcgtacttgccgccggagacactttcagagcgggagccattgaacagctggaagtatggggagagcgtacaggagtgcctgtcattaagcagacggccggaagcgatccggcagctgtcatctacgatgctgttcatgctgcgaaagcaagaaatgccgatgtattaatttgtgatacggcagggcgtctccaaaacaaagtaaatctcatgaaagagcttgaaaaagtaaaacgtgttatcgaaagagaagttcctgaagctccgcatgaggtgctgcttgcccttgatgccacgaccggccaaaatgcaatggctcaggcaaaagaattctctaaagcaacaaatgttaccggcattgctttaacgaagcttgacggtacggcaaaaggcggtatcgtccttgcgattcgcaacgagcttcacatcccggttaaactagtcggtttaggagaaaaagttgatgaccttcaggaatttgatccagaatcctatgtgtacggactcttttcagatttagtggaaaaagccgacgattaagaaaaaggccccaacatcttggggcctttttcttttttatcttcttacttgataggcgaaatgataaaggctgttatcagtggataccagtcttgactcaccagaaaaaactctgaatgggatgatgtcatagtaatgaacggaaacagatgtgtaatacgtatagtaaccagcagctggccccaaatacattggaacctcaaatgttccgtttgcatcagttgttcctgaagcagtttgtgttgtgtttccgaccttcgtgtccgcttcaaatcttacgggcgcgtttggcactggctgtccgttttggtcgagtaatttgccgcttactgtaatattgtacttgactcgccaatattgaccttgcccgtaattgattttaccgtatacccctccatctgtgctgatatttgtgattgaggccttataaggtgcctcagcagcgtctgcttgctgtgccgggaaacctattgtaaacagggctgccagacacaacataaacaataaaccgatttttttcataaaaatcctccttaaaatagggttcatatacaatatcggaataaattggatgatatttagcgtattttggaaaaggttaatcgtcgctttgacaagataaaaacttgacagtgtcaataaaaccgtgtaaactaagttatcgtaaagggatttgacttaacaaaggggagagctcaaatgtcactcgaaaagacaacgagaatgaattatctgtttgatttttatcagtcgttgttgacgtcaaaacagaagagctatatgtcgctttattatttggacgatttctccctaggcgaaatagccgaagaatatgaggtttcaagacaagctgtttatgataacatcaaacgaacagaagcgatgcttgaacaatatgaagaaaagctgctccttttgaaaaagtttcaggagcgtaaagagatgtttaataagctgaaggagcttgcttccggttcaaaagaagaggaagaaattacagctctgattgaagcgcttgagaaattagattaggaggcggcaaactatggcatttgaaggattagccgaccgactgcagcagacgatttctaaaatccgcggaaaagggaaagtcagcgaacaagatgtaaaagatatgatgcgtgaggttcgtcttgcgctgcttgaggctgacgttaactttaaagtagtcaaagattttgtcaaaaaagtaagtgaacgcgctgtaggccaagacgtcatgaaaagtctgacgcccggccagcaggtcattaaagttgttcaagaggaactgactgagctgatgggcggcgaagagagcaaaatcgccgtcgcaaaaaggccgccgactgttattatgatggtcggtctccaaggtgccggtaaaacgacaacaagcggtaagcttgcgaatctgctgcgcaaaaagcataatcgcaaaccgatgctggttgctgccgatatttaccgcccagccgcaattaagcagctggaaacactcggcaaacagcttgatatgcctgttttttctcttggcgatcaggtcagtcctgtagaaatagctaaacaggctattgagaaagccaaggaagaacattatgactatgtcattttggatacggcaggccgcttgcatatcgaccatgaactgatggatgaactgaccaacgtcaaagaaatcgcgaatccggaagaaattttcctggttgtcgattcaatgaccggtcaggacgctgtgaatgttgccaaaagctttaatgaacagctcggtttaaccggtgttgtgttaactaagctggatggagacacacgcggcggggctgcgctttctattcgcgctgtcacaaacacgccaattaagttcgcaggtttgggcgaaaagcttgatgcgttagagccgttccaccctgaacgcatggcatcaaggattctcggcatgggcgacgtgctgacattgattgaaaaagcacaggccagcgttgatgaagacaaagccaaagagctggaacaaaaaatgagaacgatgagcttcacattggacgattttctggagcagctcgggcaagtcagaaacatggggccgcttgatgagcttctgcaaatgatgccgggtgcaggtaaaatgaaaggcctgaaaaacatccaagttgatgaaaaacagctgaatcatgtggaagcaatcattaaatcaatgactgttcttgaaaaagaacagccggatatcatcaatgccagccggcggaagcggattgcgaaaggaagcgggacatccgtacaggaagtcaaccgtctgcttaagcagtttgatgaaatgaaaaaaatgatgaagcagatgacaaacatgtcaaaaggcaagaaaaaagggtttaagctaccttttatgtaatcggttatacatgataaaaccgttgttaagaaaaaacactttacaaacacttttatcattgttaatatactatcttgttgaaatattttcggaggtgctagtaaaatggcagtaaaaattcgtttaaaacgtatgggagcaaaaaaatctcctttctatcgtattgttgtagcagattctcgttcaccacgtgacggccgtttcatcgaaacagtcggaacttacaacccggttgcaaaaccagcggaagtaaaaattgacgaagagcttgctcttaaatggcttcaaactggagcgaaaccatctgatacagttcgcaacttgttctctagccaaggaatcatggaaaaattccacaacgctaaacaaggcaagtaatgactgatcaacacttggaagatttgattgtccacattgtgacgccgcttgttgatcatccagatgacattcgcgtcataagagaagaaaccgatcaaaagattgcgctgcgcttatctgtccataagtcagataccggtaaagttatcggaaagcaaggccggactgcaaaagcgattcgaacagctgtatttgcagctggcgcacagtcttctaagaaagttcaatttgaaatatttgactaaaagggagagggccggcacctcccctttttttacacgcaaaaaaagggtaaactgatagaagcttaggcaaaatagaaaagcctgggcgagtaaaagttttaaaagcggggagcttggtgcgatgcaaattattcaccgtgtagccgttatgcaagtcttaaccgagcgcagtaaagaaaagcttttagcttcttttgccgaaaagaaacaaatgcttgaacgagaatgcagccagctctattttcagcttagaaaacatgagaaagaacagcaaaaccctgatatgatagaacaatttaaaaaggcaatagaaaagcgaaaagatgatatgaaaatcatcgattttcaaattgctcaagtacatacattgcagcttggcagtgagttgaaagaaaaggaagtcgatgcgctgctgacgattgaagccggggatgactggcatgagaaaacagcagcgaacaccatcgtcataaaagacggaaaagtaattgaaattcgccagaggtgatcatatgacaaagcgatggtttaatgtaggcaaaatcgtaaatacccacggaatcaaaggcgaagtgcgggtgatttcaaaaacagattttgccgaagaacgatacaagccgggaaacacgctgtatttgtttatggacggccgtaacgaaccagtggaggtaacggtaaacacacatagactgcataagcaatttcatctcctgcagtttaaagaaagacaaaacctaaatgaagtagaagagctgaaaaacgcaatcattaaagttcctgaagaagaattaggagagctgaatgagggtgaattttatttccacgaaattattgggtgtgaagtatttactgaagaaggcgaactcatcggaaaggtcaaagaaattttgacgcctggagccaatgacgtttgggtcatcggacgaaaaggaaaaaaagacgcactcattccttacattgaatcagtggtcaaacatatcgatgtcagggaaaagaaaattgagattgaactcatggaagggttaatagacgaatgaaaatcgactttttgacgctgtttcccgaaatgtttgaaggcgtgctcggctcatcgattcttcaaaaagcccaggaaaaagatgcggtgcagtttcaagtcgtaaatttccgggagtactctgataacaagcacaatactgttgatgattatccttatggcggcggggcaggcatggttctcaagccccagcctgtttttgacgcggtcgaggacctgacatcaaaggcagccgctgctccgcgtattatcctcgtatgcccgcaaggtgagcgttttacccaaaaaaaagccgagcaattagcaaaggaagagcatttgctgttcatttgcggccattatgaaggctatgatgaacgcattcgcgagcacttggtaacggatgaaatatcaattggcgactttgttctgacgggcggtgagctccctgcaatgatgatcgcagacagtgtggtcagactgcttccgggtgtactgggtaaagaggcttcccatattgaggattccttcagcaccggacttttagagcacccgcattatacaagaccggcagattacaaaggtttaaaagtgcctgaaacactcttgtcaggaaaccatgcaaaaattgaagaatggcggaataaagaatcgatcagaaggacctacctaagacgtccggatctgttgaaagactacccgcttacagagcagcaaagaaagtggatttctgaatgggaaaaagaatagattttattgcataggctatgaaattgtgataagatactacttgtggcttaagcgggcttatccgctgcaagcttgaaaacgatgttccgctgtgccggtttttgtggccaagagcatctgttggaaggagttgaaaacgatgcaaaaactaattgaagatatcacaaaagaacagcttcgtactgatcttcctgcgttccgtcctggtgacactttacgtgtacacgttaaagttgttgagggtaaccgtgagcgtatccagatctttgaaggtgttgtgattaagcgtcgtggtggtggaatcagcgaaacgttcacagttcgtaagatttcttacggtgttggcgttgaacgtactttcccagtacacacaccaaaaatcgcgaaaatcgaagttgtacgttacggtaaagtacgccgtgctaaactttactacctgcgtgaacttcgcggaaaagcggctcgtattaaagagatcagacgataatgataacgaacgaaaagagcttgttacctgtaacaagctctttttttatacagaatttgaaaatgccggacaggcatcgtaaaatacataaaggacaacaatgaatcatgcatactgaagataaaggcggtgttcgtgtcacatgacaattcaatggttcccgggccatatggcaaaagcaagaagggaagtaaccgaaaaattaaaattaatcgatatcgtatatgaattggtagatgccagaattccaatgtcatcaagaaacccaatgattgaagatattctaaaaaacaagccgcgaattatgctgttaaacaaggctgacaaagcagatgcggcagttacacagcagtggaaagagcactttgagaagcaggggatccgctctctgtctattaattctgtaaatggacaagggttaaatcaaattgtgcctgcatcaaaagagatcctccaagaaaaatttgaccggatgcgtgcgaaaggtgtgaagccgagagcgattcgcgctttgattatcggcattccaaacgtcggaaaatcaacactcatcaaccggcttgcaaagaaaaacatagcaaaaacgggagacagacctggtattacaacctctcaacagtgggtcaaagttgggaaagaattagagctattagatacaccgggaattttgtggcctaaatttgaggatgagcttgtcggtttgagactggcagtcaccggggctattaaagactcgattatcaatttgcaggacgtggccgtgtttggtcttcgttttctcgaagaacattacccagaacggctcaaggagcgttatggccttgaggagatcccagaggacattgccgagctgtttgatgcaataggtgaaaagcggggctgtctcatgagcggcgggctcattaactacgataagacgactgaagtcatcattcgcgatattcgcactgaaaagttcggcaggctgtcatttgaacagccgacgatgtaaaggcgcgcagaaatgcgggtctttattttttcttggctgaaccgatacatacagtaagggagaagagaaagtgaatacattaaccgtaaaggacattaaagaccgtttgcaggaagtgaaggatgcacaagacccatttatttcccaatgcgaaaacgacccgagaaaaagcgttcaaacgcttgtagagcaatggcttaaaaagcaagcgaaagaaaaagcgctgaaagaacaatgggtgaatatgacttcctatgaaaggctggcaagaaacaaaggatttcgcttgattgcaggtgttgacgaggtcggccgggggccattggcaggaccagttgtcgccagcgcagtcatccttccagaggaatgtgaaatacttgggctgacagactccaaaaagctttcagagaaaaaacgcgaggaatattacgagcttattatgaaggaagcactggcggtcgggataggaattgtagaagctactgtgattgatgagatcaatatatatgaagcttcaaaaatggcaatggtgagagcgatacaggatttgtcggatacacctgattatttgcttgttgacgcaatgacacttccgctcgacacggctcaggcgtcaattataaaaggcgatgccaaaagcgtgtctattgcggcaggtgcgtgtatcgcaaaagtgacgagggaccgaatgatgagcgcttatgccgaaacgtatcccatgtacggctttgaaaaaaataaaggctatgggacaaaagaacatttggaagctctcgctgcatacggcccaactgaattgcaccgcaaaactttcgctcctgttcaatctttcagataaatcaccatggacaaggaggcacctttttaaaatgaacatacgaaatgatgtgcaaaaggcgctgcagcaccttttcgggcgtacagccgtcccgcaggaaacatcaaaagtaaacgaagcgctaaacggggagaagcgtctcctcttaggaaaagtgcttcgtttactaggagatcagcatgccctgatccaagtcggcaatcaaactgttcagggaaaacttgaaactcagcttcgtcctcaggcatactattggttttcctacgaaaaaaaaacggcagagcaaacaggccgtcttcaggtcgttcaaagctttgatcaaaatcctaaaaccattcaggatgcagctggcaaacttttaaatgctatttcagtgaagacgtcaaacgcagctctcatgatgacaggagcgatgctgaaaagcaaaacacccgtaacagaaaatgatatcaaaacagctgtccgctggatggacacgctgccttcgcaagacacaaaaaaagcagttgaaacggttctcttcgctttaaagcgtgatcttcccattcactccgagattttgaatggtgttcacgctgtgaaatcgcctgttccgttgcatcagcacgtatcccagctgctacaggcaatcgaccaaaaccctcagcagagccaaatgatgtcaaagctaaaggaagcagttacggtgcttttaaatagtgaaatcgatgtccatgcagaacggctgattgataagcttatttctttaaccgacaatacgaaagcaccttctccgacgaatacagctggaagcagggagcttagcacaccagctggctcccccggaaaagccagcctgccgattgcaaatcacacagcagaacagggaagcatacaagaagagcctgttaaaacagcagcagacattccaattaaagaagcccgccagctgctcgtgaagctgacggaatctgctgaaaaaaacagtctccaaattgtgaaagaagcagcaaattggattaaagcggctgcttcatcgggtgatagtaagtcacttgcagcttcagctgttttacaagcggcacaagtcacagaccaggaagccgaagtctttttaaaggctgttcagcagacagcaccccatttggcggataaggcagatgttctttctttcttatccaaagtgaaaacggcaatcggcgcaagggacgaggttgcgttcattaaagcgtttgaacaaggaagcgcagtcacatctggcgaaatgcaatccatcaagctggctctttctgccttaagagcatcgcatgaggtagccgaaccagtcaaacaagaagccgatcagctttttcataaattaaatggccagcttttcatgcagcaggaccatccatcatacagccaaattgtaatgtcatttccgatgttttcgaagtcaggggttcaggacatgactgttctgtttaaaggaaagaaagaagcggatggaaagcttgatccttcccattgccgccttttgtttttgctgcagcttgatacactaaaagaaaccgtcgttgattgcttggtacagcaaaaagtcatgaccattacaatagagactgatttcgagctgcaggctgcgatcgatccgatggtgcccgcgcttaaacaggggctaaaggaaatggggtacagcctttcaggggtaaacgctaaaaaaagggttcacaccgaagaaaaggcttcaatcgatcaatatataacaagtatcagtgatcaggaagtggatgtgaaaatatgaaagagcagacaccgatcagaaaagctgttgctctccattatgacgaacaaaaagacaaggcgccgagagtgattgccacagggaagggccatgtagctgacaacattatcaaagaagcgaaaaaagcaggggtcccgattcaagaagatcggacccttgtcgaattaatgcgccatttgacggtagatgatcaaattcctgaagctctttatgaaacggtagccgagattttttcattcatttacaaattggacgaaagcgtaaaaaacgaaaaatagctaaaatattccccatcctcctttgaaatttatgtttttaataaagtaaaagtttgaatgtttagaaggattaaaagattttgcatcgaactgtagacaattcttccagtattattatagaatgaaagcgcagtctattttagttttgttacataagttaggaggatgggaaatgaatatccatgagtaccagggaaaagaagtcctcagaaaatatggggtatctgttcctgaaggtaaagtggcttttacagcagaagaagcagttgagagtgcaaagagcttatccagctcggtttatgtcgtaaaggctcaaattcatgctggcggtcgaggcaaagctggtggggtaaaaatagcaaaatcattagacgaagtaaaagcgtatgccgaagaactattagggaagaccctagttacacatcagacgggtccggacggccaagtaataaaacgcttacttattgaagaaggctgcgatattaaaaaagaatattacatcggtctagtgcttgaccgcgccacttcaagaatcgttttgatggcttctgaagaaggcggaacggaaattgaagaggttgcggagaaaacaccggaaaaaatcaaaaaagctgtcattgatccggctgttggccttcaaggctatcaagccagagaaattgcattcgctattaatattccaaaagagctcgtgggaaaagctgctaaatttatgcttggactatataaagcgtttgttgagaaagactgctcaatcgccgaaatcaatccgcttgttgttaccggcgacggaaatgtgatggcgcttgatgcaaaattgaattttgacagcaatgcgttgtaccgacaaaaggacattatggaatacagagatttggatgaagaagatccgaaagaaattgaagcgtccaaatatgatctaagctacatttcccttgatggaaatatcggctgtatggtaaacggcgcggggcttgcaatgtccacgatggatattatcaagcattatggaggagaaccggccaacttccttgatgtgggcggcggtgcaaccgctgaaaaagtcacggaagcatttaaaatcattctttctgatcaaaacgttaaagggatttttgtcaacattttcggcggcattatgaaatgtgatgtcatcgcagaaggggttgttgaagcgactagacaagttggtttgacattgccgcttgtcgtccgtcttgaaggcacaaacgtggatctagggaagaaaatccttagtgaatcaggattaaacattacatctgcggaatcaatggctgacggcgcgcagaaaatcgtatccttagtttaagaaagaatgaaaggcaggggaccaaataatgagtgttttcattaataaagatacaagagttattgtgcaagggattacaggttctaccgctttatttcatacgaagcagatgcttgaatacggcacaaatatcgttggcggtgtaacacctggaaaaggcggaacagaagcggaaggtgttcctgtatttaatacagtggctgaagcagttcaaacaaccggcgctaacgcgtctgttatatatgtgcccgcaccgtttgcagctgatgcgattatggaagcggtagatgcggagcttgatctcgtgatttgtatcacagaacatatcccggttttggatatggtgaaggtcaaacgcttcatggaaggcaagaaaacgagactgatagggccgaactgtcctggtgtcattacgcctgaagaatgtaaaatcggcattatgcccggatacatccataaaaagggtcatgtaggcgttgtatcacgttcaggaacattaacatacgaagcggtgcaccagctctcagaagcgggtgtagggcaatctacagctgtgggaatcggcggcgaccctgtaaatggaacaaactttattgacgttttaaaagcgtttaacgaagatcctgacactcacgcagtcatcatgattggcgaaatcggcggtactgccgaagaggaagcggcagagtgggtaaaagccaacatgacaaaaccggtagtcggttttatcggcggtaaaacagcacctcctgggaagcgcatggggcatgcaggcgccattatttccggcggaaaagggacagctgatgaaaaaatcaaaacccttaatgcatgcggaatcgaagttgcagagacaccttctgtcatgggtgaaaccttaatcaaggtgctgaaagagaagaacttgttcgaaacttgcaaaacgcattaataaaaaagggacagccgtcaaggctgttcctgctttttctaacaaaaggaggtcaatctattggatcaggccgctgcctgcctaacgatttgcagaatcaatcaattattatccccatcccttctattaaaatggtggaaagccgatccgtctatgtcgctgacatcacccgtgttacaaacggttactcgtgatcaaataaaagcagctgcattaaaaaacgaaatagaacaattttatccaaagctcccgcgtgtacttgctgcttatcgtgagcaaggcattaacaccatccctatttcttcaaagcaatatcctttctggcttaaaagcatttatgatccccctgccgtactgtttgcaaaaggtgatatgactcttctttcgaaagggagaaaaattggaattgtagggacaagaaatccaacagcttatgggaaacaagttgtcaatcatcttacaaaagagatctgtcgtaaaggttgggtgattgtcagcggactggcgtctgggatagacggaatgtcccatgctgcaagtattaaggcgaaggggcggacaattggcgtcattgcaggcggatttcaacacatttatccccgagaaaaccttcagttagcagatcacatggctaaacaccatatcctgctgtcagagcacccacctgaaactaaaccccaaaaatggcatttccctatgagaaaccgtattatcagcggactaagtgaaggcgttattgtcgttcagggcaaagaaaaaagcggttcgctgattactgcctatcaagcattggaacaagggagagaggtatttgccgtacccggttcattgtttgacccttacgccggaggtcctataaaactgatccagcagggggctaaagccatatggtcagcagaggatattttcgaggaacttcctgagagaaacgttcaatatacggaacccttttgaattatcgtttgacaaacggtattgtaatatttaataatagtgaggatttaaagttgcatattgttttctatttaattaatgacgttcatgataaagaatgaaatgttgaaagccaaataaagacagctgcaaaaataaaattgaaatatcttgaaaagagagagaacacctcttgagggggatgaaaatgtctgattatctagtcatcgtggaatcgcccgctaaggcgaaaacgattgaacgttacttaggtaaaaaatataaagtaaaagcatcaatgggacatgtccgggatcttccaaaaagtcaaatgggagttgacatagaacagaattttgaaccgaaatatattaccattcgaggtaaaggcccggtattaaaagagctgaaaacggctgcgaaaaaagccaaaaaagtgtatctcgcagccgaccccgacagagaaggggaagcgattgcatggcatttggcacacagtcttgatttagatctcaactcagactgccgtgtggtgtttaacgaaattacaaaagacgctattaaggaatcgtttaagcatccccgcatgatcaatatggatttagtggatgcacagcaagcgagacgtattttagacaggcttgtcggatataaaatcagtccaatcttatggaaaaaagtcaaaaaagggcttagcgcaggacgcgtgcaatccgttgccctccgtttgattattgaccgtgaaaaagagattaacgactttaagcctgaggaatattggacaattgacggtacgttcttaaaaggtcaagaaacctttgaagcgagctttttcgggaaaaacggcaaaaaacttcctttaaatagtgaagctgatgtaaaagagattctttctcagctcaaagggaatcaatatacagttgaaaaagtaaccaaaaaggaacgcaaacgtaatcctgctttgccttttaccacttctaccctgcagcaggaagcggctcgcaagctcaatttcagagcgaagaaaacgatgatgattgcacagcaattatatgaaggaattgatttaggaagagaaggaacggttggtctgatcacgtatatgagaacggattcaacccgtatttcaaatacggctgttgatgaagcagctgcatttattgatcagacatatggaaaagagttcctaggcggaaaacggaagcctgcgaaaaagaatgaaaatgcccaggatgcccacgaagcaattcggccgacatcagttcttagaaaaccaagtgaattaaaagcagtcctcggcagagaccaaatgagactgtataaattaatttgggagcgttttgttgccagccaaatggcaccggctgttctcgatacaatgagtgtcgacctgacaaacaacggtttgacatttcgtgcaaatggaagtaaagtcaagttttccgggtttatgaaggtgtatgttgaaggaaaagacgatcaaatggaagaaaaagaccggatgctgcctgacttacaagaaggcgacacggtattatcaaaagatatagaacctgagcagcattttacccagccgcctccgcgatatactgaggcccggcttgttaaaacccttgaagaacgcggtatcggccgtccatccacatatgctccgacacttgatactattcagcggcgcggctacgtggcattggataataaacgtttcgttccgactgaattaggtcagatcgttcttgacttgatcatggagtttttccctgagatcattaacgttgagtttacagctaaaatggagagagatcttgatcatgttgaagaaggaaataccgaatgggtcaagattatcgataatttctacaccgattttgaaaaacgcgtcaaaaaagccgaatcggaaatgaaggaagttgagattgaaccagagtatgctggagaggattgtgaattgtgcagttctccaatggtatataaaatgggacggtacggtaaattcttagcttgctccaacttccctgactgccggaacacgaaaccgattgtgaaacaaatcggtgtgaagtgcccgagctgcggagaaggaaacattgttgagcgaaaatcgaaaaagaaacgggtgttttacggctgtgaccgttatccggactgtgaattcgtatcatgggacaaaccaattgaacgaaaatgcccgaaatgcggaaaaatgctcgtcgagaaaaaactcaaaaaaggtatacaagtccaatgcgtggaatgcgattataaggaagaaccacagaagtagcggtgagcagggtcttgctcaccttctttgtgtgttaaaagaaggccttgaataataaaataggagatgtgaaagatgaaccaacaaacagtgaatgtaatcggagccggactcgcaggaagtgaagcagcatggcagcttgccaaacgtgggattcaagtcaaattgtatgaaatgcggccagttaaacaaacgcctgcgcaccatacagataaatttgctgagcttgtctgcagcaactctcttcgctctaatacacttgctaacgctgtcggtgtattaaaggaagaaatgcgtgcgcttgattcagccattatcgctgcggctgacgaatgttcggtgcctgccgggggcgctcttgcagtagaccgtcatgaatttgccgcaagtgtgacaaatcgggtgaaaaatcatccaaacgtaaccgttattaatgaagaagtgactgaaattcctgaaggccctactatcatcgcaacgggtccgttaacatctgaatcgctgtctgcccagctgaaggagctgactggagaggactatttatatttttatgacgcagcggcgccaattgtagaaaaagacagccttgatatggataaagtgtacctaaaatcccgttatgataaaggtgaagcagcatatttgaactgcccgatgacagaagaagagtttgaccgttttcatgaagcattaacatcagcagaaacagtgccgttaaaagaatttgaaaaagagattttctttgaaggctgcatgccgattgaagttatggcaaaacggggtaagaaaacaatgcttttcggtccgatgaaaccggttggtctagagcatcctgttacaggaaaacgcccttatgccgtcgttcagctcagacaggatgatgctgcgggaacactttataatattgtaggattccagactcatttaaaatggggagaccaaaaggaagttctcaagttgattccaggacttgaaaatgtagaaatcgtcagatatggcgtgatgcacagaaacacatttattaactctccaagcctgttaaagccgacttatcaatttaaaaaccgcagtgatctgttctttgcaggccaaatgacgggagtagaaggatatgtggaatcagctgcctcaggacttgtagcaggcattaatgcggcgaagcttgtattgggagaagagcttgtgatcttccctcaggaaacagcaattggcagtatggcacattatattacaacaacaaaccagaagaacttccagccgatgaatgcaaactttgggcttttgaaagaattgccagttaaaattaaaaataaaaaagaacgaaatgaacaatacgcgaaccgtgcgattgaaacaattcaaacaatttcgaaaacaatataggtattgattgcaacctgagcgcgatttgtgataccatttaaaagcccttcctggggaggtattaggcatggagaatgttaagaatttcgtaaagttattcgttgaatatttacaaattgaaaaaaattattcacaatatactattgtgaattatgtggattcaattgaagaattcgagactttcctgcgcgttcaaggtataaatggatttgaagaagctgcatatcaagatactaggatttttttgacagaagcctatgaaaaaggtttatcgagaagaacaataagcaaaaagatatctgcattaagaagcttttataagtttctgatgcgggaaaagcttattgaagaaaatccgtttcagcttgttcatctgccaaaacaggagaaacggataccgaagtttctatatcaaaaagagcttgaggagctgtttgaagtttcagatataagccagccggccggaatgagggatcaagcgctgttagagctgctctatgccaccggaatgagggtcagtgaatgctgttccataactattaacgacgttgatttatttatggacactgtgcttgttcacggtaaaggcaagaagcagcgctatatcccctttgggtcttatgcccgcgaagcgttgaaggtatacatgaatagcggaagacagtgcttgctgatgaaggcaaaagaacctcatgatctattattcgtaaatcaaagaggcggaccgcttacagcccgtggcatcagacatattttaagcgggcttgttcaaaaagcgtcaagcactttacatatccatccgcatatgcttcgacatacgttcgccacgcatctgttaaatgaaggagcggatttgagaagcgttcaagaactgctcgggcattccaatctgtcttctacacagatatacacgcacgtttcgaaggaaatgttgagaaacacatatatgtctcaccatccaagagcatttaagaaaaattaaaggaggccctttatgtcatcttttcatgcgaccacaatatttgccgtacagcataaaggacgaagcgctatgtccggagacggccaagtaacatttggtcaggctgttgtcatgaaacacacggcacggaaagtgagaaaactgtttaacggcaaagttcttgctggctttgcgggatctgttgcagacgctttcactttattcgaaaagtttgaagctaagcttgaagaatataacggcaacttaaaacgggcggctgttgagcttgcgaaggaatggcgcagtgataaagtgctaagaaagctcgaagccatgctgattgttatgaatcaggatactttgcttctcatatcgggaacaggcgaggtgatcgaaccagatgacggcattctcgcgattggatcaggaggcaattacgctttggcagcgggaagagcactgaaaaagcatgccggtgaaagcatgtctgcaagtgagattgccagagccgcgttagaaacagcaggcgaaatttgtgtttacacgaacgatcaaatcatactggaagagcttgaatagaaaggacttgaggcgcatggaaaaaaaaccgttaactcctagacagattgtagatcggttagaccaatatattgtcggtcagcaaaatgcgaaaaaagctgtcgccgtggcattaagaaaccgctatagaagaagtcttctggatgaaaagctgaaggacgaggtcgttccgaaaaacattttaatgatgggtcctaccggcgtcgggaaaactgaaattgccagacgaatcgctaagctttcaggtgcgccatttatcaaaattgaagcgactaaatttaccgaagtcggctatgtaggcagagatgttgaatcaatggtcagagatcttgtggagacttctgttcggcttataaaagaagagaaaatgaatgaagtaaaggaacaggcagaagaaaatgcaaacaaacgcattgttcgtctgttagttcctgggaagaaaaaacaatctggcgttaaaaatccgtttgaaatgttttttggaggcagccagccgaatggtgaagatgaggcggagagccaggaagaagcaaacatcgaagaaaaaagaaaacgaatggcacatcagctggctttaggagagctcgaagactactatgtaacagtagaagtcgaagagcagcagccttctatgtttgacatgctgcagggctcgggtatggagcagatgggtatgaacatgcaggatgcgctgagcggattaatgccaaagaaaaagaaacggcgcaaaatgacagtcagagaagccagaaaagttctgacgaatgaagaagcaagcaaactcatcgatatggatgaagtcggccaggaagcagttcagagagcagaagagagcgggattatctttatcgatgagattgataaaatcgcaaagaacggcggtgcatcttcttctgccgatgtttcaagagaaggcgttcagcgggatatccttccgattgttgaaggttctaccgttgtcacaaaatatggttctgtaaaaacagaccatgtattatttattgcagcaggagcgtttcatatggccaaaccgtctgatttgattcctgagctgcaggggcgtttcccaattcgtgtagaactgaacaaactcacggtagacgacttcgtgagaattttggttgagccggataatgcgctgctgaaacaatatcaggcattattgcagacagaaggtatatctcttgaattttctgacgaagctattcataagattgctgaagttgcttatcatgtgaaccaggacacagataatatcggtgcgagacgccttcatacaatacttgaacgcctattagaagatttgtcgtttgaagctccagatgtaacgatggagaaaataacgattacaccacagtatgtcgaagaaaagctcggaacgatagccaaaaacaaagatttaagtcaatttatattgtgaaaaatttaatatgaggaatgtttaggaggattatttatcatggctttattacaaaaaacaagaattattaactccatgctgcaagctgcggcagggaaaccggtaaacttcaaggaaatggcggagacgctgcgggatgtaattgattccaatattttcgttgtaagccgcagagggaaactccttgggtattctattaaccagcaaattgaaaatgatcgtatgaaaaaaatgcttgaggatcgtcaattccctgaagagtatacgaaaaatctgtttaatgtccctgaaacatcttctaacttggatattaatagtgaatatactgctttccctgttgagaacagagacctgttccaagctggtttaacaacaattgtgccgatcatcggaggcggggaaagattaggaacacttattctttcacgtttacaagatcaattcaatgacgatgacttaattctagcagaatacggcgcaacagttgtcggaatggaaatcctaagagaaaaagcagaagaaattgaagaggaagcaagaagcaaagctgtcgtacaaatggctatcagctcgctttcttacagtgagcttgaagcaattgagcacatttttgaggagcttgacggaaacgaaggtcttcttgttgcaagtaaaattgctgaccgtgtcggcattacccgttctgttattgtgaacgcactcagaaagctggagagcgccggtgttatcgagtctagatcattaggaatgaaaggtacttatatcaaggtactaaacaacaaattcctaattgaattagaaaatctaaaatctcattaatcacaaaaagaaccctttttgagggttctttttttatttcaaataaaggaaatcaataagctttatttcctgggttgaaagtctttctatgtaataattttaataaattttgcatttttcttcaaaaagtttcaaaaatgccgaaaagaaaggagaaaaaacagaaattctgctattttcaggcttatatcaaggcgagaaatgtagttctaacaatctaggactttatacctagttgcaaaatagataattgtgaggacatttttttacacgaacttcatagactttatgcctgttatttcttacaataagcatatagttttacaattctcgacaaggatattgagggtgaaaaaaactgaaatggaggtaagtggatttgagcttattttctggaacgatacaaaatcttgaaaatgccttgagtagagcggatattaagcaaaaagtcataactaataatatcgccaatatagatacaccgaactataaggcaaaaaaagtctctttccaaaatttattagatcaagaatcctcgcgtcttgaagcgataaaaacagactatcgtcatgttgatttttctgatactgattcgaattattcaattgttgcgagcggagatacatcgtatcagcaaaacggaaacaatgttgatgttgacaaagagatgacagaattggcgcaaaatcaaatcaactatcaagctttggttgaaagaatgaacggtaaatttaattcgctgaagaccgtattaacaggaggaaaatgatgacagcttttcatagcttaaatgtttcagcatcggctttaacagctcagcgagtcagaatggacgttgtatcatctaacttagcaaatatggatacgacaagagctaagcaggtgaatggagagtgggtgccttacagaagaaaaatggtttcccttcagtcaaaaggtgaatcgttctcttctattctcaattctcaaatgagcggaagcgggaatgctggaaacggtgtgaaggtttcaaaaattacggaggatgattcagattttaatcttgtctatgatccgacagaccctgatgcaaacgctgaaggatatgtacaaaagcctaatgttgatccattaaaggaaatggttgatcttgtcagcagcaccagatcatacgaggcgaatgtcacggcgatgaatgccacaaagggaatgctgatgaaggcgttagaaatcggaaagtaggtgaatgaatgtgattaatgcaatttctccttttcaggttcaaaatactcaaaacactcaaaatgcaacaaatcaagtaaacaatagccaaaaaacagattcttcaaatcaaacaagcttttcggagcttttaaaaaactctattagttcgttaaatgagtcccaagtagcttctgacaacatgactaatgccttggctgcaggaaaagatgtaaatcttgatgaggtcatgatcgctgctcaaaaagccagcatctctctaactgcagcaacagagttccgcaataaagctgtggaagcttatcaggagattatgagaatgcaaatgtagggggtctgacgatttagagaaagagtggaatgaccgggggttaacatgaatcgtactctaatgcaaatgaaaaacaaaacgagtgagttttggaaaaatagatctaaattacaaaagattttaatggttagtgctttagcggcaattattattattggaattattattagtgtttttgcttcgaattctaaaatggcgccgctgtacaaagatttgtctgccgaagaagcaggacaaatcaaagaagaattggatgcaaaaaaagtgccaaacgaactttcgaatggcggtacagtgattagtgttccggaggatcaggttgattctttgaaagtgcagatggctgcagaaggacttcctaaaacgggatcaattgattattcgttttttggacagaatgccggctttggtttgacagacaatgagtttgatatggtgaaagtgaaagctacacagacagaactgtcaaacttgatcaatgaaatggacggtattaaaaattcaaaagtaatgattaatctcccgaaagacgctgtgtttgtcggtgaggagcaatctgcagcatctgcatcaatcgttttgcagattcaaccgggttatacacttgatcaaagccaaatcaacggattatatcatctggtatctaaaagcgtgccaaacctaaaagaagataacatcgtcatcatggaccaaaattctacatactacgacaaatcagacagcgatgcagggtcctacgcggatagttattcttctcagcaaggaattaagtctcaagttgaaaaagacattcaaaaacatgtacagtcattgctgggtacgatgatgggccaagataaagtcgttgtctccgttacagcagacattgatttcacaaaagaaaatcggacagaagacattgtcgaacctgtggataaagaaaacatggaaggcattgcagtcagcgctgaaaaggtatctgaaacatatcagggcgacggtgcagccaacggcggaactgccggaaccggcgaggaagatgtaccaaattataaggctgacggtgaaaataccgaaagcgggaactatgaaaaaaacagcaacaaaatcaattacgaggttaaccgaattcataaagaaatcgctgaaagtccttataaggtcagagatttagggattcaagtaatggtagagccgcctgatgccaaaaacacagcgtcgctatcaactgaaagacaggatgatatacaaaaaatcctttcaactgtagtcagaacatctttggataaagatgaaacgcaaaatcagaatttatctgatgctgatatcaataataagattgttgtttccgttcagccattcgacggaaaagtcaatttggatacaaatacggaaaaatcctctggtatcccgctgtgggcatatattgtaggcggtgttttaatcgcagcgattattgttctgatcattatgcttatcagaaagaaacgggcgcaagaggatgaatttgaggaatatgagtatgaggttcctcaagaacctatcaatttgcctgatatcaacgaagaggaaaatgaaacagcggaatcagtcagacgaaaacagcttgaaaagatggcgaaagacaagccggaagattttgcaaaactgctgagaagctggctggccgaggattaggaggaattagaaatggcgagacgtgatcaagataagcttacaggaaaacaaaaagcagccattctcatgatttccttggggttagatgtgtcagcttctgtctataagcacttaaccgatgaagaaattgaaaggcttactctggaaatatcaggtgttcgaagcgtcgatcatcaaaaaaaggatgaaatcatagaagaatttcataatatagccattgcacaagattatatttctcaaggcggtttaagctatgcaagacaagttctggaaaaggcgcttggagaggataaggcagagaacattctaaacaggctgacttcttctttgcaggttaaaccatttgattttgccagaaaagcggagcctgaacaaattttgaattttatccagcaagagcatccgcagacgatggcgttaatcttgtcttatttagatccagtgcaggccgggcagattttatccgagctgaatccggaagtacaggctgaggttgcgagaagaatcgcggttatggatagaacatctccagaaataattaatgaggtagaacggattctggaacaaaaattatcttctgcatttactcaggattatacacaaacaggcggaattgaagctgttgtggaagtgttaaacggggtagacagagggacagagaagacgatcttggattcattggaaattcaggatcccgatcttgctgaagaaattaaaaagcggatgtttgtcttcgaagatattgtcacacttgataaccgtgccattcagagagtcattcgcgatgttgagaacgacgatttgctcctttcattaaaggttgcaagcgaggaagtcaaagaaattgtattcaacaatatgtcacagcgtatggttgaaaccttcaaagaagaaatggaatttatgggccctgtacgcttgaaagatgtagaagaagctcaatcgagaattgtaagtatcgtcagaaagcttgaagaagccggtgaaattgtaatagcaagaggcggaggggatgatattattgtctaatatcattaaacaagaatcatctatttctccacaaaaggaaaaaagaaaactttctatacaagaggtgcgtattgatcattctcaccttttgcaggctgaagagaacccggaggcgcttatggcccgagtgaaagaggaagctgatcggatttctgagcaggcaaacagtcatatagaaaatattcgccgtcaaattgaacaggagaaaaacgattgggcggctgaaaaacagaagcttattgaagaagcaaaagccgagggctttgaacaaggagtagcgctgggcaaagctgaggcaatgaaacagtatgcagaactgatcggccaagcaaacagtataactgaaatgtccagaaaagctgttgaggacaagcttgaagacgctaatgaagaaatcgttgagcttgccgttgccctagcaaaaaaagtttggcagcaaaagtctgatgataaagaggctttcctcctgcttgtacaacaggttataaacgaagtgaaggaatatgacgatatatcaatttatgttgatccatattactatgagacaatctttcagcaaaaagatgaaatccagcagcttctttataaagaatgtcggcttggcatatatgctgatgaaaaagctcaaaaaggaacctgttatattgaaactccttttggcagggtagatgcgagtgttgacacacaattgatgcaattgaaagataaacttctgacagcgctggaagcaggtgcagctgaatgaagacacagagtctgatagattgtatagaaatgacagactcgtataaacggtacggaaaagtcaagcgggtcatcggcctgatgattgaatcaaaagggccagcaagctcaattggcgacgtgtgcctgatttatgcaaaaggacaatctgggaaagtcattaaagctgaggtagtcggcttccaggaagaaaatattttgcttatgccttatttagaggctgcgagcattgcacctggcagcattgtagaagctactggggaatcacttcgggttaaagttggaaccggactgattggacaagtcatcgatgcttttggagaaccgcttgacggaaaacttctgcctaaagggctttcgcctgtatcaacggagcaatcaccgcccaacccgatgaaacggccgcctatccgtgaaaagatgggtgttggagtcagatcaattgacagcttgctgacagtcggtaaaggccagcggattggaatttttgcaggaagcggtgtcggaaaaagcaccttaatggggatgatcgccaagcagacagaggctgacttaaacgtcattgcacttgtcggagaacgcggacgagaggttcgggagtttattgaaaaagatctggggaaagaggggctgaaacgatcgattgtagtcgttgccacctcagaccagccagcattaatgagattgaaagcggcatatacagcgactgcaattgccgagtatttccgagataaaggccaaaatgtcatgtttatgatggattctgttacaagggtggcaatggcgcagcgagagattggactggctgcaggagagcctccgacgacaaaaggttatacaccttcagtgttcgctattttacctcgtttactagaacgaacaggtgcaaacgagcatggaaccattacggcattttatacagtgttggtagacggggatgacatgaatgagccgattgccgatactgtacgcggaattttagacggacatattgtgttggacagggcgcttgccaataaaggccagtttcctgcagttaacgtactaaaaagcatcagcagggtgatgtcaaacatttcaacaaaacagcatctggatgcggcaaataaattccgtgaacttttatcgacatatcaaaattcggaagatctcattaatatcggagcttacaaaagaggatcatccagagaaattgatgaagcgatacaattttatccgcagcttattcaatttttaaagcagggaacagacgaaccggctttattggaagaaagcattgctgcattaactagtttgacaggaaatgaggaataaacgtggcttatcaatttagattccaaaagctgctggaactaaaagaaaatgaaaaagaccaatccttatccgagtatcagcaatcagtttctgaatttgaaaacgttgctgaaaaattatatgagaatatgagcaaaaaggaattgctggaacaaaataaggaaaagaaattaaaaagcggcatgagtgtacaagaaatgaggcactaccaacaatttgtctcaaatcttgataatacgatctatcactatcaaaagcttgtcattataaaaagaaatcaaatgaatcaaaaacaagaaattttgacagagaaaaacattgaagtgaaaaagtttgaaaaaatgcgtgaaaaacagtttaaaatgtttgctcttgaagataaagctgcagaaatgaaagaaatggacgatatttcgattaagcagtttatgattcaaggccattaggagcgaatgtaatgtccggcaaaaagaaagaatcaggtaagttccgttcggttttgcttatcattatcctcccgctgatgtttctattaatcgcaggggggattgttctttgggctgctggtatcaatgtcataaagccgatacaggatgctgcggcaaaaacgccggttcttaaagaattggtccctgaaaccgaaaataaaaaaggcgcagcatcaagtaaggatagcagtaatacggcagctctggaaaagaccattaaggatcaaaaaagtgaaatcagtatattgaataaagatttagaaacaagtaaatcagaaatcgataggctcaatcaaaagatccgttcacttgaaaagacggctgaggatcaaaaaaagtcatcagaagatcatactgaaggatcagcagactcgaaagcttcttctgaaaatgacaaagtgatcagtgtgtacaaaagcatggacagcggaaaggctgctaaaattattgcccaattaaaggagcaagaagcactgaaaatattgaatggcctaagcaaaaagcagcttgctgacatattggcgaaaatgactcctgagcaagcagcaacctatacagaaaaaattgctgccagccaagaatagggggaatgaaaggtgaagctgcttgaattagccggacctttgctgcaaaccacaacgggttctgccgctaaaaacatgaaaagtagccaaggagtttttcaaaactggcttatgtctgaggctggattgaaggaactttcagaacaaggaaagggtactcctaattccgaagatcagcttttagcagatgcgcttaaaaagatcggtgactggctaaatgcaagtcctgaagatcaagacaaacaaaatgcggatcttttgcaaacattaagcaaactgacagggaagcaattggatgcgaatgctctgcaaatgttgcaaaatcttttgcaagcagttgaatcaaaaatgtcaggcgggacggatcaattgctcacagaaacggagaaaatcttttcagaagctaaaacggctctgagtgccaatgattctgcttctgacattaatggagcactgaagtctgatacagagcaatcaaatcaggaaaatgaagtatccgagcctgctaaagagcttatctatatccagatgttcattagccagctcgtagaagggaataagctgactgatcgcgggaatggcaatgaagctcatgccatttaccaaaatggagatcaattcctttctgcattagaaaagaagggtgtatctcaacaactaattcaggatcttaaacagcaaatattcactaaagctgagtcaagttcaaaactttactcgatgacagcgtcagagctgaaaagttttcaaagcttaatggatcaaatgtctatgcttcctcaaaaagggaccaaagaatggagtttagctgaaagccagctgaaagccttcttgttatcgaaatcatccgaatcatcacaagactttgggaagcgtgttctcacaccgctctcgcagagttcatccagcaaaaatgcatcggatgtttctggaagtattcagcctgtagatagtaaatcaggactccaaatgctgttttcggggtatcggggcataggaggagttcaaacacttgatctgcagcagatgtcatctgatataccaaatgccgaaacaaaaacggtggctgatcaagtgattaatgcgtggaagcagatgaaatatacgcctttcggcagatcgacgggaagtttcactattcggctgaaccctgaacatttaggatttgtcacaatcaagctgacaaatgaaaatggaatgtttcagagtaaaatcatagcatctagccaatcagcaaaagaattgcttgaacagcatcttcctcagctgaagcaatcattgccgaatatggccgtccaaattgaccgttttactcttccggtccaaagcggggatcagccgatatacggccagcttgctgatgaacagaaacagcagcaagaggggcagagacagcaaagacagaaaaagcaatcaaatgattttggcgatctgctcgatgaagtgtcgatggttgaaatggaggaagaagaatgacttctataagttcagaatataaactgcctgaaaaaacgaacactgtgtcgacgaacaacagcagcttggggaaagacgagtttttaaaaatattaatgactcaagttcaaaaccaagatccgcttaacccgattgacgataaagaatttatcagccagatggcgactttttcaagcttggagcaaatgatgaatctgaatacgacaatgactcaattcgttgaaaaccaagatccgtttacaacgtatgttgattggatgggaaaagaagtatcttggactgatggtaaaagtgcaacagataaaacaggcacaataagctctgttaaacattttaaaggaaattattatctcgttcttgatgatgggaccgagatcagtcctgcgaatgtcatgtctgtgggacaatcatctaaataaaaacatctgggggaatatattatgttacgttcactttattctggaatcagcggtatgaagaactttcaaacaaagcttgacgtaatcggtaacaacattgccaacgtaaatacagtaggattcaaaaagagccgtgtgacctttaaagatatggtaagccaaaccattgccggcggttctgctgctggtgcaacaatcggcggaacaaactctaagcaaatcggtttaggttcatcatctggcacaattgatacaattcattcaacaagcgcgacacaaagcacaggaagaacacttgatttagcaattgacggcgacggttacttccgaattgatacaggtgacgggacagcttatacaagagcagggaacttctatttagataatactggaacactggttacaggtgatggctaccatgtactaaatatgaatggcggaacaattaaaattcctactgatgctcaaagctttagcattggttctgatggaaaggtgtcaattgttgatgctgaggggaaaacacaagacgggggacaaatcgggattgttacttttgccaacagtgacggcttagataaaatcgggagcaacctataccgtgaatctttaaactctggaacggccagtgcagcgaaccagcctggtgacggcggaactggtgctcttaaatcaggatttctcgaaatgtctaacgtcgatttaactgacgaatttactgaaatgatcgtagcccagcgcggattccaatcaaactcaaaaattattacaacatctgatgaaatccttcaagaactggttaaccttaaacgttaaggagggaggggaggcgagtaatcgcttctccgctgttttatgattaaagtaacccgtttgaacgggcagccctttacactgaatgcgctatttattgaacagattgaatgttttccggatactacaattactctgtcaaatggtaagaagtttgtagtaaaagaagatgaagaagctgttctggaaaagatcgcagctttctaccgaaaaatacaaatatttgcaatggatcaaggaatagaggaaccggaatgaagaaaaagttaatgatcatattactaattattcttatcgtaattggtgctctcggggcggcggcttattttgttttaggcggaaagtccgaaaaaagtgaagcgaaaaaaagtattgatgaaatcgttgcgtcttctgttgatgtagaagagatcacaacaaatttaaagtctgataacattatccgtcttgctattaaacttgaaactgattctgataaatcaaaagaagaacttgagaaacgtgatttccaagtgaaagacgctgttatatcactgctggctgatacgaatgctgatcagattgagggagacaagggaaaagaaacctttaagaaggaactaaaagataaaataaatagctacctccaagaaggaaaagtagaaaaagtgtatattacctcctttaatctgcaataaagcataatttgacagaatacggaggtgaggaaaatgtcaggagaagttctctcccaaaatgaaatagatgcactgctctctgcaatatcaactggtgaaatggacgctgaagagctgaaaaaagaagaaaaagagaagaaagtcaaggtttatgatttcaaacgtgcgctgcggttttctaaggatcagatccgcagtttaacgagaattcatgacaattttgcaagacttcttaccactcatttttctgctcagctcagaacctatattcacatatctgtcagttctgttgatcaggttccgtatgaggaatttatcagatcgattccaaacatgacgattctgaatctatttgatgttcatccgatggaaggaagaattatgatggaggtcaaccccacgatagcttatacgatgatggatcgagtcatgggcgggattggaatcagtcataacaaggttgacagtttgacagaaattgaaacaaaaatcatttctaatttatttgaaaatgcactgggtaattataaagaagcttggcagtcaattgctgatattgaaccggaaatgactgagtttgaagtgaatccgcaatttgttcagatggtatctcctaatgaaacagtcgtggtgatctcgctcaatactcaaattggtgaaatcagcggtgtcattaatctctgtatcccgcatattgtactcgagccgctcataccgaagctttcagtccactattggatgcaatcagaccgaaatgagccaaagcctgaggaaacaaagtcgcttgaaaaacgtatcatgacagcacaaatacctgtcgtggccgagctcggcacatctgaactgacgatagaagagtttttaagtttagaagtcggagactgcataactttggacaaatcagtcacggatcctcttactgtattggtcggagataagccgaaatttttaggacaagccggccgggtgaatcgaaaacaggcagtgcaaattttagatcacgacataagaggtgaacaagatggagaataatagattatctcaagatgagattgacgcgcttcttaacggtactggcagcacgcttgatgagccagagattccggaagtagatgacttatcggaaatggagcgtgatgcgatcggtgaaatcggtaatatttcattcggcagttctgcgacagcactgtcaacgcttttaaatcaaaaggtcgatattacgactccaagcgtaacggtcattccaagaagtaaaatcagcgatgcgtttcctgaaccgtatgtagcgattgaagtgaattatacggagggcttcagcggaagcaacctgttagtcgtggaacaaagtgacgcggcgatcattgcggacttaatgatcgggggagacggaaaaggtgcggacccttcactgggtgaaatccatttaagtgcggttcaagaagcaatgaaccaaatgatgggatcggctgccacatcaatgtctactgtattcagtaaaaaaattgatatttcacctcctcgggttgaattgctggatgttactgaagaaaagggtacagaccgtattcctgatgatgaaatgctggtgaaagtttctttcaacttaaaggtgggagaattaatagactccagcattatgcaactttacccattgacatttgcgaaagatttaatttcaagccttatgaactcagaaagtgcagaggaagaagaaacggtgcagcctgaagttacatacgaacagccgaaagagcctgtgacgccagagccgcgtattgaaccgaagcaacagcagcagccgccaaaaaggcagggaacagcaaaaaaagcagcgccagttcaggtttcaccggtggaattttccgcgtttgatccaaacgaagctgtacaagcccctattcataatctggatatgcttttggatatcccgctttcgattactgttgagcttggcagaacgaagagaagcgtaaaagagattttagagctttctgccggaagtattatcgagcttgataaattagccggtgagcctgtagatattttagttaatcagcgtatcgttgccaaaggcgaggtcgttgtcattgaagaaaacttcggagtaagagtcactgacattttaagccaggcagagcgcattaataatttaaaataacgaaacacaaggagagagatagattatggcacatagaattttaattgtagatgacgcagcatttatgcgaatgatgattaaagatattttagttaaaaatggttttgaagttgtggcggaagctgaaaatggagcacaagcggtagagaaatataaagagcattcacctgaccttgttactatggatatcacgatgccagaaatggatggtattacagcattaaaagaaattaaacaaattgatgcgcaggcaagaatcatcatgtgttctgctatgggacagcaatcaatggttattgatgccattcaggccggcgctaaggatttcattgtgaaacctttccaggctgaccgtgtgcttgaagcaatcaacaaaacattaagttaaagggtgtacgactgttgaaaaagagtcaatattttattgtttttatttgttttttcgttttattcagtgtacatccgattgctgctgccgcggcagactctgataattcaactgtaaacgaatggtttcaaaagaaagatgaaaaaactgcagatcaatcagagcaaaagaaagaaaaaacaacaaaaactgctgatgagacggagggagcggctgctccttctgtctcagcttttgattttgtaaagatgattttcgctttattgtttgttatcgcgctgatttacgggctggttaagctcatgaacaaaagaaatcggctcctaaagccttttcaatatgttgaaaatattggcggcacatcggtcggccagaacagatccatacaattgatcaaggtcggaaaaagtgtgctcatcgtcggtgtaggagagacgatccagctgctgaaagaaattgaggatgaaaaagagattgaagtcattctcagtcagcatgaagaggcaatgtcaagcaaaatagagtggcaaaagtttgtgaagccgcttaagagttctgaacatcagccgcagcaaaaactgccttcattttcaaaagcattaaaagagcaacttgaagagttaaaacaaaaccgttctgaaggaaagaagaaaggcccacgtcatcatgaatgagtttataaatattttcagttcaagcgatccggaaaacgtaagttcgactgttaaattactattattgttaactgtattttcagtggcgcctggaatattgattcttatgacttgttttactcgcatcgtcattgttctgtcatttgtcagaacttcacttgcgacgcaatctatgcccccaaaccaggttctaatcgggcttgcgctgtttttaacattttttattatggctcctactttttcagaaattaataaagaagcgctgaccccattaatggacaacaaaatcagcttggatgaagcgtatacgaaagctgaggaaccgattaaagaatttatgagtaaacacacaaggcagaaggatctggcgctgtttatgaattacgcgaaaatggataaacctgaatcattaaaggatattccgttaacaacaatggttccggcttttgccatatcggagcttaaaacagcatttcaaataggttttatgatttttatcccttttttaattatagatatggtagtggcgagcgtcttgatgtcaatgggaatgatgatgctgcctccagttatgatttctctgccctttaaaatattactttttgttttggtagacggctggtatttaattgtgaaatctttgcttcagagcttttagggtaggtgctaaacgtgagttcagaatttgtaatttctatggcggaaaaagccgtatacgtaacgctgatgatcagcgggccattattggctattgctttactggtcggtttaattgtcagcatatttcaggcgacaactcaaatccaggaacagactttggcgtttattccgaaaatcgtggcggttctcctggctctcattttttttggtccgtggatgctgtcgacgattctttcatttacaacagagctgttttctaatttaaatcgttttgcagggtaatgtagagatgaattcaattattgacttatttcctgcttttttattggtttttattagaatctctgctttttttgtaacgattccgctatttggacatcgaaatgtgccagctgttcatcgcataggttttgctttttttcttgcggtcatttgtttcagcaccattgataaaccgccctctttggagatagatgagcactatatgcttttggcgtttaaagaagctttggtcggcctatgtctgggtttaattgcttatatgatgattgccgcagtgcagattgccggctcgtttattgattttcaaatgggattttcaatagcaaacgttattgatccgcaaaccggtgcacaaagtccgttgattggccagtttatctatacgatggcacttttgtttatgctaagtgtcaatgcccaccatttgttgctggatggtatttactacagctttcagtatatttcagttgatcaggcatttccgaatttcggcgatgaaaagtttgcctattttattgcgaaaagctttaatgcaatgtttattatcgcttttcaaatgtcagcgccggttgtggccagtttgtttctagttgatttagcattaggtatcgtggctcgaactgttccgcagttaaatgtatttgtggtcggtctgcctttaaagatcgctgtcagtttcattatgctcattgtatgtatgtccgttatcttcgtcgttgtccggaatgttttcagtttaacgattgaaacgatgcggaatcttttagcattggtcggtgtttcttaatgaagcttagagttgacctgcagttttttgcgggagagaagacagaaaaagccactccgaaaaaacggaaggatacgcgaaaaaaagggcaggtagccaaaagctcggatgtcaataccgccgtttctttactggtaatattcctttcgcttattgcaattggtccgtatatgagagacaggctgctgtcattcatagaaacattttataccgaatcgctcacaatgaagctctcagaatcaaatgtgcatacattgtttgtcagcttattaaaggatatgggcatgatactcgcaccgatcttgctagttgctcttgttgcaggagtcgtaagcaactatatgcaggttgggttcttattttctgctgaagtgatacagcctaagcttgaaaaactggatccgatcaaaggctttaaacgaatatacagtatgagggcgattgtagagctgattaaatcaattttgaaaatcgtagtcgttggttttgcggcttttgctgtgctttggctgcattatggagaaattctccggcttcctctcctgacacccgaagaggcactttctttcgtttcaaaactcactttgtggatgggactaagcggtgcaggtgcattgttgattcttgctggtctcgactatttatatcagagatttgactatgagaaaaatatcaaaatgtcaaaacaagatataaaagatgagtacaaaaaatctgaaggagacccgattatcaagtctaaaattaaacaaagacagcgggaaatggcgatgaggcggatgatgcaggaagttccaaaagcagatgtcattatcacaaacccgactcactatgcgattgctttgaaatatgatgaagaaaaaatggacgcaccttatattgttgcaaaaggcgtcgaccaccttgcgttaaaaatcaggaaaattgctaaagagcatgatgtcatgatggtagaaaacagaccgcttgcccgtgcgttatatgatcaggtggaaattgaccaggcagtgccggaagaattttttaaagttttagcagaaattctggcttacgtatataaaacaaaacaaaaagtatattgaatttttcgatttaaaaggagagaaaaaacagcatgtcaacaagagatttatccgttttaataagtgttgtcctcattgtggcgatgctggtgattccatttcctccatggctgttaagtattttgatcattattaatatttctcttgcattgatcgtgcttctcaccacaatgaatatgcaggaagcgcttcagttttcgatttttccgtcactgttgctgcttttgaccctatttcgtttgggcttgaacgtctcaactacccgttcaattctttcacacggtgaaggaggtaaagtcgtcgagactttcggaaatttcgttgtcggcggaaatgtattagttggactcgttgtatttatcatccttattattattcagtttatcgtcattacaaaaggtgctgaacgtgtttccgaggttgcagcaaggtttacgctggacgcaatgcctgggaagcagatgagtattgatgctgatttaaacgcagggatgattaccgaacaggaagcgaagcatcgccgcgaaaaagtggcaagagaagcagacttttatggagcaatggacggtgccagtaaatttgtaaaaggtgacgccattgccggaatcatcattgtgatgatcaatattattttcggaatcgtgatcgggatgcttcagcagggcatgtccattcaagaggctgcttcacactttacgatgctgactgtaggggatggaattgtttcgcaaatcccggcactgttaatttctacggctacgggtattgtggtcacaagagctgcctctgaaggaaacttagggcatgacattacaggccagctgtttgcgtatccaaagcttttatacgtcgcagcagctacgatcatgcttttaggtattttcactccgatcggcatccttctgacggggccgcttgcgggattgcttgcttttggcgcatatacactatctaaatcaggtaaggaaaaagaagaagtggatgagattcttgaggaagaggctgaggtggacgagcttaaaagccctgaaagtgttgttcagcttctgcatatagatccgatagaatttgagtttggatatggcctgataccgcttgctgatgccaatcaaggcggtgatttattagaccgaattgttatgatacgccgtcagttggctttggaactcgggcttgtcattcctgtcgtgcgaatcagagataatatagcgttgcagcctaatgaataccgattgaaaattaaaggaaacgaagtagcaaaaggcgagttgttgcttgatcattatttagcgatgtcgcctactcctgaggacgatctcattgaagggattgaaacagtggagccttcattcgggctgccggctaaatggattagcgaagcggtaaaggatgaagccgacatgcttggttatacagtagttgatcctgcatcagtcgtttcaacgcatattacggagaaaattaagcagcatgcccacgaattgatcggaaggcaggagacaaaacagctgatcgatcacttgaaagaatcgtatccagtcctggttgaagaggttacgccgaatccattgtctgtcggtgatattcagaaagtgcttgctaagcttttaaaagaaaaagtttcaattcgaaacttagtaacgatttttgaaacacttgctgactatgggaaattaacaacagattctgatcttttgacagagtatacaagacaagcgcttgctaaacaaattacagcccagtttgccaaagaaaatgaagtgttgaaggttgttacttgttccggccgtgtagaaaaagcaatagcagacggtgtgcagcagacggaacacgggaactatttatcacttgaaccagatatttcagaaagtatagtgcgctctgtcgccaaagaagctgaacagctctcattacgtcaggaaaccgcgattcttctttgctcgccgcctgtcagaatgtatgtgaagcagcttctggaacggtacttccctgatcttccggtactctcttataacgaacttgaggcgaatgttgaggtacaaagcattggagtggtggatatttaatgaaaataaaaaaatttactgctgcttcaatgcaagaagcggcacttctcatcagaaaagagttaggtaatgaagcggtcatattaaattcgaaaaaaattaaaaagcgaaaatggtttggcctcgtcaacaagcctgctgttgaagtaatcgccgtattggatcaggactttcttgagaaaaaaacgcctcagaaggcagctgaaccgaaacaaacattaaaaactccggtcagcagtccaaaaatagaggagagaacatatccccctcaaattccggcgcaacaggagctaggtgatttttcagcatatcaatctgtacttcctgagccgctgcgaaaagcagaaaagcttttgcaagaaacagggatcaaagagtctacgaaaacgaacactctgaaaaaattgcttcgcttctctgttgaagcaggcggcttgactgaagaaaatgttgtcggcaaacttcaggaaatactatgcgatatgctgccctcagcagacaagtggcaggagccaattcattcaaaatatatcgttctctttggttcaacaggggctggtaaaacaactacactggctaaactcgcagccatatctatgcttgaaaaacataaaaaaatcgcttttattacaacagatacgtatcgtattgcagctgttgaacagttgaaaacatacgctgaactgctgcaggctcctctggaagtttgctatacaaaagaagaatttcagcaggcgaaggagctattttctgagtatgatcatgtgtttgttgatacagctggaagaaacttcaaagacccgcaatacattgatgaactgaaagaaacgattccttttgagagcagcattcagtcatttcttgttttatccgcgactgcaaaatatgaagatatgaagcatattgtcaaacggttttcatccgtccctgtcaatcagtatatttttacgaaaatagatgaaacgacttccttaggttctgtatttaatatactggcagaatcaaaaataggtgtcgggtttatgactaacggccagaatgtgcctgaggatatacagactgtatctccacttggttttgtgaggatgctgtgcagatgaacagatatgaccaagcagcaactttacgggcgaaaatggaaaaacgtgagcgcgttctgccaatggtttattcacaaaaagcgaagacacttgctgtcatcagcggcaagggcggtgtcggaaaatccaatattaccttaaatatggcacttgcgctgcaggataaaggtaagaaggtgctgctcatcgaccttgatatcgggatggggaacattgatatattaataggaaattcatcgtctgccacgataatcgatgttttaaccgatcgtcagcctttgctgcagtcattatccgttggcccaaagggtttgcggtatatatcagggggaaccggtcttgatgtgatgtttcagctcgatcagagaaaatggacgttttttgccaatgaactttctcatgcattaagccagttcgattatgtgctgtttgacatgggagcaggcttatcaaaagatcaactgccttttattttatcagcagaagatattttgattattacaactcccgagccgacggccattatggacgcatacagcgctgtcaagcacttggttttgacagaaaataagctttcaatgaaggtggctgtcaatcggtgccgtgaccaaaaggaagggcttgacgcttttgcccgcctctcccgtacaattcatatgtttttggatgttcaggttcagtttgccggttccgtttctgacgatgtgatcgtgagcaaagcggttgtcgaacaggttccttttttcataaaaagccctcaggcaaaagccagccggtcagtccgtattttagcggacgccttgtttgaaagagaagaaacgagacacaaagaagacaaacagacatttattgagaaattatcttcttttttaatgaggagggcttaatttgattcgtgtgcttgtagttgatgattcagcttttatgagaaaaatgataagtgattttctgaccgaagaaaagcagatagaagtaatcggaactgcgagaaacggagaagaagcgcttaagaagattgaattattaaaaccggatgttattactcttgatgttgaaatgccggtcatgaatgggacagatacgctccgcaaaattattgagatttataacttgccggtcattatggtgtctagccagaccgagaaaggtaaagaatgcacaattaattgtttggagatcggtgcctttgactttatcacaaagccatcaggctcaatatctctggatctatacaaaattaaagaacaactagttgagcgtgtcgtcgcggcaggactttccggcaagcggaaacgtcctgtttcccagacagttcggcccgaacctattgtgcgtgctgtcgttaagcctgaattaagcaaaccgaaacctggcacgggcagacaaattgtgtgtatcggcacatcaacaggcggtccacgggcgttacaaaaggtgataccgaagctccctaaggatttgaacgcaccagtggttgtcgttcagcacatgcctgaagggtttactgcttctttggctgatcggctgaatcatttatctgacattcaggtaaaagaagcaaaagatggtgaagcagctcttaacggctgtgtttacatagcaccgggcggaaaaaacatatccgttattaaaaacagcgaaggactccaggttgtgcttgataaccatgacacaccaagccgtcataaaccatctgctgattatttattccgttctgtcgggaaactgacagattatgaaaaagtagcggttatcatgaccggaatgggcagtgacggcactgctggactaaaggacatgctaacagccggcaatgtgaaagccattgcggagtctgaagaatcttgtgtcgtatacgggatgccaaaagctgctgttaaagcgggtctcattcatgagattaaacatgtggaagatatcgcagcatccatcacaagctgtgtgaaaaaagagagggtgtgattcaaatggatatgaatcagtatttagatgtctttattgatgagagtaaagaacatttacaaacatgtaatgaaaagcttcttcttttagagaaagacccgactgatcttcagctcgtacatgatatattcagggctgcccatacattaaaaggaatgagcgcaacgatgggctacacggatttagcacatcttacccatctgcttgaaaacgtgctggatgcaatccgaaacggagacatggaagtcacctcagactggctggatattttgtttgaagctctggatcacctggaagcaatggttcagtctattattgatggcggggatggtaaaagagatatctcagaagtgagtgccaagcttgatgtgaatggtgcgcacgctgaatccgctgcctccgctgaacctgcagaagcacagagttcagcatctgattgggaatatgatgaatttgaacgcacagttatacaagaagcggaggagcaaggcttcaaacgatatgaaatcaagatttctctgaacgaaaactgtatgttaaaagcagttcgtgtctatatggtgtttgaaaaactaaatgaagtcggagaagtagccaaaacaattccaagtgctgaagtgcttgaaacagaagattttggaactgactttcaagtttgtttcttaacacatcaatcagcggaagacattgaacaattaatcaatggcgtgtcggaaattgagcatgttgaagtcattcaaggggctcctttaacatcagctgaaaagcctgaagaatctaagcaagaagattcaccagcagcagctgtacctgcgaagcaggagaaacaaaaacagcctgctaaaaacgatgaacaggcgaagcattcagccggcggatctaaaacaattcgtgtcaacattgacaggcttgattctttaatgaacttatttgaagagcttgtcattgaccgcgggcgtctcgagcagattgcgaaagagcttgagcataatgaactgactgaaacggttgaacgaatgacgagaatttccggagatttgcaatcgattattctgaatatgagaatggtcccggttgaaactgtttttaacagattcccgagaatgattcgccagcttcagaaagagctgaataaaaaaattgaactctcgatcatcggtgcggaaactgaactggatcgtacagtaattgatgaaatcggagatccactcgttcacttgatcagaaacagtattgaccatggtatcgaggcgccggaaacacgtttgcaaaagggaaaaccggaatcaggaaaagttgtgcttaaagcttatcacagcggcaaccatgtctttatcgaagtagaggatgacggcgcaggccttaatcgaaaaaaaattctggaaaaagcgcttgagcgcggggtcataacggaaaaagaagctgaaaccttagaagacaaccaaatttacgaattgatttttgctccggggttctcaactgctgaccaaatttctgatatttccggccgcggtgtaggacttgacgttgtaaaaaacaaactggagtctcttggcggttcagtcagtgtgaaatcagccgagggtcaaggctctctattcagcatccagctgccgcttaccttgtctattatttcagttctgctgattaagttggaagaagagacatttgccattccgatttcttcaatcattgagacagcagttattgacagaaaagacattttgcaaacgcatgaccgtgaagtgattgactttagagggcatattgtccctgtcgtttatttaaaagaagagtttaaaatagaagatacaagaaaagatgcggaacagctccatatcattgtcgtgaaaaaaggcgacaaacctactgcatttgtggtggactcctttattggccagcaggaagttgtgctgaaatcactcggagattatttaacaaacgtctttgcaatttccggagctactattttaggagacggagaagtagcgctcattattgattgtaatgcactgattatttaaccattcgaggaggtgtctcacatgactgcagaaattaaaacaggcgaaaaaatgatagtctttatggtaaatggcaaagaatatgccatttccgtcactcaggtgaaatcaattgaaaaatggcaaaagccaacgagggtacctggcgtcgaaccatatatttgcggggtaatcaatttacgcggggtggtgactccggttattgatttaagaaaacgcctgaatttgccagagtatgaaattacagatgaaacacgaattatcattattgcttatcgtgatattgaagtcggctggattgtggatgaagcgaatgatgtgattaccgtacacgaaagtgaaatagaatctgctccagaaggcgttcagaaagatacggatgtgtcgatcgaacagattgtgaaacaagagaacagactcttaaatattattgatgcgaacgcggttttggataaagaatcatctcagtccgctgtgcccgatcaagcttaatcttaaaggggttatgacatgagtatttttaatggaatcaaagaagagcagatggacattttgcgggaagtcggcaatataggcgccggccactccgcctctgcaatggcccagctgttaaatagaaagatagatatggaagtcccatttgcaaagctgctgtcttttgatgagcttgttgattttttcggcggcgccgatgtcccggttgccagcatctttttaagaatggaaggcgatttaacgggttcaatgttctttataatgcctttttttcaggcggagcagtttatcagagagctgattggaaaccccgattttgacatagaggacttaggtgaagaccacatgagctcatccgctttgcatgaactgggcaatattttagcggggtcatatttaacagctttggcggatttgacgaaactccagctctatccaagtgttcctgaagtctctttggacatgttcggagcagtgatcagcgaagggctgatggagctcagtcaggttggagaacacgccattgttgtcgacacgtcaatttttgaccaaagccatcagcaggagctgaaagcgcatatgtttatgctgccggactatgattcatttgaaaagctctttgtcgccttaggtgcatcattatgagtacaactgaggctgttgttataaaggttgggattgctgacgtgaagatcgcccgcttcccggataccatccggacctctggtttgggctcatgtgtggggctggtgctttatgataaagaaaagcaaacggcgggtcttgttcatgtcatgcttccggattcgacgttatcgaaaactgccgagctcaaccgggctaagtacgctgacaccgccgtacagaccacgattgatatgctgatagaagcgggatgccggaaatttgcattaaaagcaaagctggccggcggatcagagatgtttaaatttaaatcgacaaatgatttgatgaagatcggaccgagaaatgtattagcgataaaagaacagctgtctttatttaatattcctattattagtgaagatacgggcggctcaagcggccggacgatagaatttgaaccgaagtcctgcatgctgcatattcgaactgttaaacaaggtgaaaaaacgatttaattaaggtattagggggataacaatgcaatccttgaattatgaagatcaggtgctttggacgcgctggaaagagtggaaagatcctaaagccggtgacgacttaatgcgccgttacatgccgcttgtcacatatcatgtaggcagaatttctgtcggactgccgaaatcagtgcataaagacgatcttatgagccttggtatgcttggtttatatgatgcccttgaaaaatttgaccccagccgggacttaaaatttgatacctacgcctcgtttagaattcgcggcgcaatcatagacgggcttcgtaaagaagattggctgcccagaacctcgcgcgaaaaaacaaaaaaggttgaagcagcaattgaaaagcttgaacagcggtatcttcggaatgtatcgcccgcggaaattgcagaggaactcggaatgacggtacaggatgtcgtgtcaacaatgaatgaaggtttttttgcaaatctgctgtcaattgatgaaaagctccatgatcaagatgatggggaaaacattcaagtcatgatcagagatgacaaaaatgttccgcctgaagaaaagattatgaaggatgaactgattgcacagcttgcggaaaaaattcacgaactctctgaaaaagaacagctggttgtgagtttgttctacaaagaggagttgacactgacagaaatcggacaagtattaaatctttctacgtcccgcatatctcagatccattcaaaggcattatttaaattaaagaatctgctggaaaaagtgatacaataatgaatttcatggttagcgagtgaaaaacatgtcaacactattatggcttttaagctttacgctccacggcgttcttctgtacgctgtcattatcctgtatacgaggctcgctgcagtgaaagaaacagaaaaacagcaaaaacagatacttgaagagacggaaaacaccttggcggcatttctgcttgaattaaaagaagaaaatgagaaactgatagaaaataaagcttcatctgcaagtcaatacgatgaagaatcccaaaagccaggccttcagccctctgaaacatatcaagagcgggatccagtccaagaggcagagaatcttcctgaacatattgaaggtctgattacagaggttgaccgtcgggaagagatcgtaaacagtgaggtccaatcatttgaagaccaggtcatagaattatatgaacagggatattcggcaagtcaaattgcccagaaaatgaagagcggaaagacagaaatcgagctatttttaaaatttcgctccaaaggtgtaaaggattcttgattgtcggataaagctgtgttatattatgtcttggtgttaaatacacacgcttaacgatttatgcagagggtgctgcaggcggcagttctgcacaaaaatgacctaagcggaggaaaaaaaccattatattaggaggaaataacatgtcagtcatttctatgaagcaattgcttgaagctggtgttcacttcggtcaccaaacacgccgttggaacccaaaaatgaagcgttacattttcacggagcgtaacggaatctacatcattgaccttcaaaaaacagtcaaaaaagtagaggaagcttacaacttcactaaaaatcttgctgctgaaggcggaaaaatccttttcgtcggaacaaaaaaacaagctcaagattctgttaaagaagaagctcaacgctctggcatgtactatgtcaaccaacgctggttgggcggtacattaacaaactttgaaacaatccaaaaacgtattaaacgtcttaaagacattgaaaaaatgcaagaaaacggtacgtttgatgtacttcctaaaaaagaagtcgttcaattgaaaaaagaattagagcgtcttgaaaaattcctaggcggaattaaagatatgaaggatcttcctgatgcattattcatcatcgatcctcgcaaagagcgcatcgctgttgcggaagctcgcaaattaaacatccctatcatcggtatcgtagatactaactgtgatccagatgaaatcgatgttgttatcccagcgaacgatgacgctatccgcgctgttaaacttctaacttctaaaatggcagatgcaatcttagaagcgaagcaaggcgaagaagaagcggaagttgctgaagaaactgcaccagaaacagaaacaacaactgcgtaacctattcaaaaggtgataagagggactgccttttatcaccttttttcaagaaaaatgtgtaatatacatactcttgtttaaacatataaggaggaatacaaatggcaattactgcacagcaagtaaaagaactgcgtgaaaaaactggcgcgggcatgatggattgtaaaaaagcgttaactgaaactgacggagatatggacaaagcaattgaccttttaagagaaaaaggaattgcaaaagcagcgaaaaaagctgaccgtatcgcagcagaaggttctactcttattaaaactgacggcaacaaaggcgttatcctagaagtaaactctgaaactgatttcgttgcgaaaaacgaaggttttaaagagcttcttaacactttagctgaccaccttcttgcaaacacgccagctgatgttgaagaagcaatgggccaaaaaatggaaaatggctcaactgttgaagagtacatcacaagcgcagttgctaaaatcggtgagaaaatcactcttcgccgctttacagttcttacaaaagacgacagctctgcattcggtgcgtaccttcacatgggcggccgcatcggtgtattaactgttctcaacggtacaactgatgaagaaactgcgaaagatatcgcaatgcacgttgctgcagttaaccctcgttacatttctcgtgatcaagtatctgaagaagaaacaaatcatgagcgtcaaatcttaactcagcaagccctccaagaaggcaaacctgaaaacatcgtagcgaaaatggttgaaggccgtctgaacaaattcttcgaagaaatttgtctattagaccaagcgttcgttaaaaacccagatgaaaaagtgaaacaagttattgcagcgaaaaacgctactgttcaaacttttgtccgctatgaagttggagaaggcatcgaaaaacgtcaagaaaactttgctgaagaagtaatgaaccaagtgaaaaaataatggtgaaaagatttcgcggctaagtcgcgtcttttcaggcagtataggggacacattttgtgttccctatttttaaaactatatttacaaacctttttttctcttgcataatagaaaacggcaatgtttacacttggaggttatcatggaaaaaccaaaatacaaacgtatcgtattaaagcttagcggggaagcattggcaggagaacagggaaatggaattaacccgactgtcattcaatccattgcaaagcaagtgaaggaaatcgctgagcttgaagtcgaagtggctgttgttgtaggcggcggcaacttatggcgcggaaaaacaggaagtgacctgggcatggaccgcgcgactgctgactatatgggaatgctggcgacagtaatgaattcgcttgctcttcaagacagcttggaaacactcggaatccagtccagagtgcaaacatccattgaaatgagacaagttgctgaaccgtacataagaagaaaagcgatacgccacttagagaaaaaacgtgtcgttattttcgctgcgggcacaggaaacccatatttctcaactgatacgacagctgcactgcgggctgctgaaattgaggcagacgttattttaatggctaaaaataacgttgacggtgtgtataatgctgatcctagaaaagatgaatcagctgttaagtatgaatcactttcttatcttgacgttcttaaagacggcctggaagtcatggattcaacagcttcctctttatgcatggacaatgacattccgcttatcgtcttttctattatggaagaaggaaatatcaaacgtgccgttatcggtgaatcaatcggaacgatcgtgagggggaaataacgtgtcaaaagaagtattaactcaaacaaaagaaaaaatggaaaaagcaattgctgcttatcagcgcgaattggctactgtacgcgcaggccgtgcaaatccatcattattagataaagtaacggttgaatattacggagcgcagacacctttaaatcagttgtcttctattaacgtgcctgaagctcgtatgctcgttatcacaccatacgataaaacagcaatcggcgatatcgaaaaagcgattttaaaagctgatttaggtcttacaccaacaagtgacggcaatatgattcgaattgcaattccggcactaacagaagagagacggaaagaattagtgaaagttgtaaaaaaatatgctgaagaagcaaaagtagctgttcgtaacgttcgccgtgatgctaacgatgatctcaaaaaacttgagaaaaacggagacattactgaggatgaactgcgtgcttccactgaagacgttcaaaaactgacagatgaatatgtgtcaaaaattgacagtgtcacaaaagacaaagaaaaagaaatcatggaagtttaatgaaaaactatgtacaatagataatagtgaaaagaccctctcatgtttacagggggtttttttgttaatactgttgattacattgattatcagcagggaatgtaacctttttgggtgacggaggaatctcatgctcaacatactcaaaaattggaagaatcagcaaactgcggcttccaacttagaacgttatacaaaagaagacatacttaagggagaaattcccgaacacatcgccattatcatggatggaaatggccgttgggctaaaaaacgctctcttcccagaattgcaggccaccatgaagggatgaaggtggtaaaaaggaccacgaagctcgcaaacgaattaggtgtcaaagtactgacattgtatgcattttcaacagaaaactggaaaagaccgaaaatggaggtcgattttttaatgaagcttccggaagaatttttgaatacgtatcttccagagcttgttgaggaaaatgtacaggttcggatcattggggatgaaacggctttgccggcgcacacattacgtgcgattgaaaaagctgtacaggacacggcgcaaaacgacggaatgatccttaattttgctcttaactatggaggccgtactgaaattgtcagtgctgcaaaatcactcgcggaaaaagtgaaggaaggctctttgaatattgaagacattgatgaatcgcttttttctacttatttgatgactgaatctttgcaggatcctgaacttttaattcgaacgagcggcgagataaggctgagtaattttatgctatggcaggttgcctacagtgaatttgtctttactgacgtcttgtggcctgactttaaagaagatcacttcttgcaggcgttaggagagtttcagcagagaggccggaggtttggcggaatttagaggatggtggacatgaaacaaagaattttgacaggtgttctggcagcaattgtatttttatttttggttattgtcgggaaattgccgttcaccatattaatttatgctatgagcagtgtggcgctttttgaacttttacggatgaaaaagctgaagctggtttcactgcctggtttgatcggtcttttattattgtggatgttcttattgccaagccagtattcgttttttgaagcggacgggatttccaaaatggaaatagctttatttgcggtactgctattgctgacttacacagtgttggtcaagaacacctttacttttgatgaagtcgggtttattacgcttgcagcaatttacatcggaatgtgttttcattattttatcgaaatcagaaatcttgaccaatacggattaacatacattttttatgcgtgtgttgtcatttggtccaccgattccggtgcctattttgtcggtaaatcgcttgggaagcggaaactgtggcctgaaatcagtccgaataaaacagtggaagggtttgcaggcggaattgtcatcgcacttgtattggcgacgatttttcagcttgttgcacaacttccgatcccgtatatctatctgctgttgatcacgctgtttttgtctgtttttggacaactgggagatttagtggaatccgccttgaaaagacattacgatgtaaaggattctgggaatattcttcccgggcatggcggtatattagaccgttttgacagtttcttgtttgtcatgcctttcttgtactttctgcttgcccttttttcataaaaaagtctaatatgaatatgagactgatcatgcagcaataagaataggagtagtggcaactttgaaaaatatttgtcttttaggagcaacaggatcaatcggcgaacagactcttgatgtactgcgtgcacatcaagaccaatttcagctggtatctatgtcgtttggcagaaatattgataaggccgttccaatgattgaggtctttcagccgaagtttgtctctgtcggtgatctggatacatatcataaattaaaacaaatgtctttttcttttgaatgccaaatcgggctgggagaagaaggactgatagaagcagcagtgatggaggaggttgacattgttgtcaacgctttgcttggaagcgtcggtcttatcccgacattaaaggcaattgaacagaaaaaaacaattgcgcttgcaaataaggaaactcttgtcactgcagggcatatagtaaaagaacatgctaagaaatatgatgttccgctgctgcctgttgacagtgagcattcagccatttttcaagctcttcaaggcgaacaggctaaaaacattgaacgcctcatcattacggcatccggcggaagttttcgggacaagacgcgggaggagctcgaatcagtaacagttgaagatgcattaaaacatccaaactggtcaatgggtgcaaaaattacaattgattcggctacaatgatgaataagggattagaggtgatcgaggcacactggcttttcgatataccttatgaacaaattgatgtggttttacataaggagagcatcatccattcaatggttgagttccatgataaaagtgtgatcgcacagctcggaactccggatatgagagtccccattcaatatgcgctcacttatcctgaccgattgccattaccagatgcgaaaaggcttgaattatgggaaatcggcagccttcattttgagaaagctgattttgacaggttccgatgcttacaatttgcttttgaatcaggtaaaataggaggaacaatgccgacagtgctaaatgcggcaaacgaagtagctgtcgctgcctttttagctggcaagataccgtttttggctattgaagactgtatcgaaaaggcactaacccgccatcaattactgaaaaaaccgagcctggcggacattcaagaagtggacaaagatacccggggatacgtcaattcaatactcacataaggtggtatgttcgtgaatacagttatagcgtttatcattattttcggaacgctcgttttcttccatgaactgggccatttattgctagcccaaagagcgggaattctctgccgtgaatttgcgatcggcttcggtccaaagattttttctttcaaaaaaaatgaaacagtttatacgatcaggctgcttccggtcggcggatttgttcgtatggccggcgaagatccggaaatgattgaggtgaaacccggatacacggtcgggcttctgtttaataaagaagatcaagttgagaaagtcatcatcaatcaaaaggaaaaatatccggatgctttagtcattgaagtggaaacagcggatctagagcatgacatgaagatcactggttatgaacaggggaaagaggacgaactttccagctttactgtcagcgaaacatccttttttattgtagacggagaagaagtgcagattgcgccgtataatcgccaatttggttccaaacctgtatggcagcggattaaagcaattgctgcagggccgattatgaactttattttagcttacgtcattttagtgatgcttgggctgattcaaggcgtaccgtcaaatgaacctatgctcgggcagctgacagacaatggacgggcggctgaagcagggctaaaagaaggggattatatccaaagcattaacggagagaaaatgaggtcttggactgacattgtctccgctgtaaaagaaaacccggagaaagaaatggacgttgcagtaaaaagagataacaaaacgcttcatatttcggtgactccggaagctgttaaagatgagaacaaaaaaacaatcggacgtttcggttcctatgcgccgactgaaaaaggcgtactctcagcggttgcttacggcgcgacatcaacagttgatgtcaccaaagccattttaaccaatctgagcaaattagtaacaggccaatttaaactcgatatgctgtcaggtcctgtcggcatatatgacatgacagaccaagtggcgaaaacagggatcgtgaacttatttcagtttgcggcgtttttaagcattaaccttgggattgtcaacctgcttccgattccggcacttgacggaggaagactgttgtttctatttattgaagcgattcggggcaaaccgattaacagggaaaaagaagcatttgttgtgtttatcggagtagctttcttaatgcttcttatgctggttgtcacatggaacgatatccagcggctgtttttgtaaacgaaaagtaaatcaatcagaggtgcgaagaaatgagacaaagcttgacgcttattcctacgctccgtgaagttccagctgatgccgaagcaaaaagtcatcagcttcttctgagagcaggatttatcagacagaatacgagcggggtatacagctatatgcctcttgcgtataaggtgattcaaaacattcagcagattgttcgagaggaaatggagaaaattgatgccgtagaaatgctcatgcccgcattgcagcaggcagagacatggcaggaatcaggcagatggtatacgtatggtcccgaactgatgagactaaaagaccgtcatggccgtgaatttgctttaggggcaacgcatgaagaggttatcacttcgcttgttcgcgatgaggttaaatcttataagcgtctccctctgactctttatcaaattcagtctaagttcagagatgaaaaacgtcctcgcttcggtttgttaagaggccgcgaatttattatgaaggatgcgtactctttccatgcatctgcagagagcctggatgaaacgtatcaaaaaatgtacgaggcctattctaatatttttgcccgctgcggcattaatgtaagacctgttatcgctgattcaggcgcaatgggaggaaaggatacgcacgaatttatggcactttctgcgatcggagaggatacgattgcgtattctgatgaatcacagtacgcggctaatatcgagatggctgaagttcttcaccaggaagttccttcagatgaagagcctaaagctctagagaaggttcatacgcctaacgtgaaaacaatcgaagaactgactgcgttcttacaggtttcggctgaagcgtgcattaagtcagtattgtttaaagctgatgaccgttttgtcttagtgcttgtaagaggggatcatgaagttaacgatattaaagtgaaaaacttgcttcatgcagaagttgtagagcttgctacacatgaagaggtcattcagcagctcggaacagagccaggctttgtaggccctgtcggtattcatcaggatgtggaagtatatgccgatcaagctgtgaaagcaatggttaatgctgttgccggggcaaatgaaggagatcatcattataaaaatgtcaatgtgaatcgtgacgcgcaaattaaagaatttgctgatcttcgttttattaaagaaggtgatccttcaccagacggcaagggaacgatccgttttgctgagggaatcgaagtcggacaagtctttaagctcggaacacgctattcagaagcgatgaatgcgacatatttagatgaaaacggacgcgcgcagccaatgctgatgggctgttacggaatcggtgtgtcaagaacgctttctgctattgctgaacagcatcacgacgaaaaaggcttaatatggccaaaaagcgttgcgccgtacgatcttcatattcttgctttgaacatgaaaaacgatgggcaaagagagcttgctgaaaagctgtatgccgatttaaaagcggaaggctatgaagtgctctatgatgaccgtgctgagcgtgccggcgtaaaattcgctgattcagatttaatcggccttccaatccgcatcactgtcggaaaacgagctgacgaaggaatcgtcgaagtgaaaattcgtcaaactggtgagtcaactgagatttcagtagacgaattatctgcgtttatcagcaagcagtaatcaccataacgatttatcaaaaaacatgttaaaatagaaataatagaaggtacctcattgcctgaggtaccttcacttatgatgtttttagggagggatactgtcttaatggaacagttatcagtaaacagaaggcagtttcaaattcttctgcagcagattaatatgacagatgataccttcatgacatactttgaacatggcgagattaaaaagctgacaattcacaaagcttctaagtcttggcattttcattttcaatttaaatctttgctgccttttcaaatatatgacacattaacaacgaggctgacgcaatcgtttgcccacatagcaaaagtgacatcttcaattgaagttcaggatgccgaggtcagtgaaagtatcgttcaagactactggtcacgctgcattgaagaactgcagggcatttcgccgccgattatcagtcttttaaaccagcaaaaaccgaagctgaagggcaataaactgattgtcaaaaccaaaacggatacagaagcggctgcgctaaaaaacaaatacagttccatgattcaagcaggctaccgtcaatttggctttccggatcttcagcttgatgctgaaatatttgtatccgagcaggaagttcaaaagtttcgggaacaaaagcttgcggaagaccaagagcgggcgatgcaggccttgattgaaatggagaagaaagataaagaaagtgatgaagaccaagcaccatctggtcctcttgttatcggttatcaaattaaagataacgaggaaatccggacacttgacagcatcatggacgaagaacggagaattacggtccaaggttatgtgtttgatgtggagacgcgcgagctgaagagcgggcgcacgctgtgtatcttcaaaattacagactatacaaatagtattttgatcaaaatgtttgcacgtgaaaaagaagatgcggcactgatgaagtctctgaaaaaaggaatgtgggtaaaagcacgcggaagcattcaaaatgatacatttgtcagagaccttgtcatgatcgcaaatgacgtaaacgaaataaaagcaaaaacccgtgaagattcagcacctgaaggagaaaaaagagtggaattgcatcttcattccccaatgagccaaatggatgctgttacgggtatcggaaagcttgtcgaacaggcgaaaaaatgggggcatgaggccatcgctttgactgaccatgctgtcgttcaatcctttcctgatgcgtattctgcggcaaaaaagcatggaattaaaatgatttacgggatggaagcgaatctcgtggatgatggcgtgccaattgcttataatgccgcacatcgtctgctcgaagaagaaacatatgttgtttttgacgttgagacgacaggattgtctgctgtatacgataccattattgagctggctgcagtaaaagtaaaaggcggagaaattattgataaatttgaggcgtttgcgaacccgcatcgtccgctttccgccacaatcatagagctgacagggatcactgatgatatgctacaagacgctccggatgtcgtagatgtaataagagatttcagagaatggattggcgatgatatccttgtcgctcataatgcaagctttgatatgggattcttaaatgtagcctataaaaagcttcttgaagtcgataaagctaaaaacccagtcattgatacgcttgaacttggacgttttctctatccggaatttaagaaccaccggttgaacacactttgtaaaaagtttgatatcgaactcacacagcatcaccgtgcgatctatgatactgaggcaaccgcttatttgcttctgaaaatgctgaaagacgcagctgaaaaaggcattcagtaccatgatgagttgaatgaaaatatgggtcagtccaatgcttatcaaagatcaagaccgtatcatgcaacattacttgccgtgaacagcacgggacttaaaaatttatttaagcttgtgtcactttctcatattcattatttttacagagtgccgcgtattccgagatctcagcttgagaaatacagggaagggctgctgatcggttctgcctgtgacaggggagaggtttttgagggaatgatgcaaaaatcgcctgaagaggtggaagatatcgcgtcattctatgattaccttgaggttcagccgcctgaagtgtatcgtcacttgctggagcttgaactggtccgtgatgaaaaagcgctgaaagaaattattgcgaatatcacgaagctgggggaaaagcttaataaaccggttgttgctacgggaaatgttcattacttgaatgatgaggataaaatctacagaaagattttaatatcctcacaaggcggggcaaatccgctgaataggcatgaactgccgaaagtgcatttcagaacgacagacgaaatgcttgaagctttttctttcttaggtgaagaaaaagcgaaggagatcgtagtcaccaatacccaaaaggttgcttctttagttgatgacatcaagccgattaaagatgatttatatacgccgaaaatcgaaggcgccgatgaagagatcagagaaatgagctatcagcgtgcaagaagcatttacggggaagagctgcctgaaattgtcgaagcgcggattgaaaaagagttaaagagtattattggccacggatttgctgttatttacttgatctctcacaaacttgtaaaacgttcactagatgacgggtatctcgttggttcccgtggttccgtaggatcttcattagttgcgacacttactgagattactgaggtaaacccgctgccgccgcactatgtttgtcctgagtgtcagcattctgagttctttaatgacggttctgtcggttctggttttgacctgcctgacaagacatgtcctcattgcggaacgcctttgaaaaaagacggccatgatattccatttgaaacgttcttaggatttaaaggggacaaagtacctgatatcgatttgaacttctcaggggaatatcagccgcaagcacacaattacacaaaagtattgttcggagaagacaatgtatatcgtgcgggaacaataggcacggtggcagaaaaaacagcctacggttatgtaaaaggctatgccggagacaacaatcttcatatgcgcggtgccgaaatagatcggctcgtacagggatgcacaggtgtaaaacgtacaactggacaacaccctggcggtattatcgtagttccggattatatggatatttatgatttttcaccgatccagttcccggcagatgccacaggttcagagtggaaaacgactcattttgatttccactccatccatgacaacctgttaaaacttgatattctcggacacgatgacccgactgttattcggatgcttcaagacttaagcggaatagatccgaaaacaattccgacggatgatcctgaagtgatgaagatcttccagggaaccgaatcactcggtgtgactgaagaacagattggctgtaaaacgggcactcttggaattcctgaattcggaacccgatttgtccggcagatgcttgaagatacaaagccgaccactttttctgagctcgttcagatttcaggcttgtctcacggaactgatgtatggcttggcaatgcacaggagctcatccacaataatatttgtgagctgagtgaggttatcggctgccgtgatgacattatggtttatttaatctatcaaggccttgaaccgtcccttgcctttaaaatcatggaattcgtgcgtaaaggaaaaggattaacgcctgaatgggaagaagaaatgaaaaataacaatgtcccagactggtatattgattcctgtaaaaagattaaatacatgttcccgaaagcccacgccgcggcatatgtcttaatggcagtccgcattgcttactttaaagtgcatcatgctcttttgtattatgcggcttattttaccgttcgtgcagatgactttgatatcgatacaatgatcaagggctctacagcaatcagagcggtaatggaggatataaactctaaaggacttgatgcttcaccgaaggaaaagaaccttctgactgttttagaattagcgcttgagatgtgtgagagaggctattcattccaaaaagtcgatttatatcgctccagcgccacagagtttattattgacggcaacagtctaattccgccgtttaactctattccagggttagggacgaacgctgctttgaacattgtaaaagctcgcgaagaaggcgaattcctctcaaaagaagatttgcaaaagagagggaaagtatcaaaaacgattttagagtacttagatcgccacggctgtctggaatcactgcctgatcaaaaccaattgtcactgttctaatatggaatgcagaatttctcagaaattctgcttctatgcatacataagcgcaaaaagtgccatcgtaatattagagtttctgtcacttgcttaggtatgaaggtaagcgtatatccatttgcaataaaaatatggttatggtatagttttattggaaatgctaacgattaccgaggcaaagagtggggaaacccgctcttttgtattgaacaggagaattttgtctcgacatgttcatcgtttactttttagcccctgctcttttgaagcagggtttttatgcagagtgacgagacgaatatgagatcgacagcacaaggaggaagaacatgagcaaaaaagtgactgacaccgttcaagaaatggctcagccaatcgtagacagccttcagctggaactcgttgacattgaatttgtcaaagagggccaaagctggttccttcgcgtgtttattgattccgatgacggtgtggatattgaggaatgtgccaaagtaagcgaagctttaagcgaaaagcttgatgaggcagacccaatcagccaaaattactttcttgaagtctcatctccaggagctgagcgtccgctaaagaaaaaagccgatttcgaaaaatcactaggaaaaaacgtatacattaagacgtatgagcctattgacggcgtaaaagtgtttgaaggtgaactggctgaatttgatggacaaacagtgacagttgagatcacgatcaaaacaagaaagaaacggatcaatattccgtatgaaaagatagctaatgcaagattagctgttacattctaatgaatacaaatgttttaaggggggagaccgttaaatgagcagtgaattattagatgctctcacgattcttgaaaaagaaaaaggcatcagtaaagaaattatcatcgaagcaatcgaagctgcgttaatttctgcttataagcggaattttaatcaagcgcaaaatgtacgggtggatctaaaccgtgaaactggctccatccgtgtatttgcaagaaaagatgtcgttgacgaagtatacgaccagagattagagatctcaattgaagaggcacagggcatccatccggaatatatggtcggcgatgtcgtcgaaatcgaagttacacctaaggatttcgggcgcatagctgctcaaacagcgaagcaggtcgtcacacagcgtgtgcgcgaagctgagcgcggcgtgatctattctgaatttatcgaccgtgaagaagacatcatgacagggatcgtccagcgtctggacaataaatttatctacgtgtctttaggcaaaatagaagccttgctgccggttaatgagcaaatgccgaatgaaagctacaagccccatgaccgcattaaggtatatatcacaaaagtagaaaaaacaacgaagggcccgcagatttatgtgtcaagaacacatccaggcctgttaaagcgtttgtttgaaattgaagtgcctgaaatttatgatggaactgtcgagctaaaatctgttgccagagaagccggcgaccgttcaaaaatttctgttcgcacagatgatcctgacgtggatcctgtcggttcatgcgtagggcctaaaggccagcgtgtgcaagcaatcgtcaatgaattaaaaggtgaaaaaattgatattgtcaactggtccagtgatcctgtagaatttgtcgcgaatgcgctcagcccttccaaagtgcttgatgtcatcgttaatgaagaagaaaaagcgacaactgttattgttcctgattaccagctgtctctggcaattggcaaaagaggacaaaacgcacgcttagctgctaaactgacaggctggaagattgatattaagagcgaaacggacgcaagagaacttggaatctatccgagagaacttgaagaagatgatgagccgctctttacggagcctgaaactgctgaatcggatgaataagaggtgactttaggtgaataaacacaaaaagatcccattacgcaaatgtgtagtgactggtgaaatgaagcctaaaaaggaactgatccgagttgtacggtcgaaagaaggcgaaatctcagtagacccgaccggaaaaaagaatgggcggggtgcttatttaacgctggataaagagtgcatcttagcagcaaaaaagaaaaacactttgcaaaatcaatttcaatcacaaatcgatgaccagattttcgatgaattgctggaactggcggaaaaggtgaaaaaataaaatgtctggaatggaatggtttcccttgctgggtctggccaatcgagctcgtaaggtcgtgtcaggcgaagacttggtaataaaagaaatcaggaatgcgcgtgcaaagcttgtcctgcttacagaggatgcatcatctaacacagcaaaaaaagtaactgacaagtgcaattattataaagtcccttataaaaaagtcgagagtcgcgcggttcttggacgctctatcggtaaagaagcccgtgtcgttgtcgccgtcactgaccaaggttttgcgaataagctgatcagcttgctcgattaatatttttgggggtgaacgaatggctaaaatgagagtatacgaatatgcaaaagcgttaaatgtttcaagtaaggaaattttgaccgcactgaagaacatggatttagaagtgaataatcacatggccatgcttgaagaaaaggccattaaaaagctagatgccaaatataaaaaaggcggcgcagctgctaaatctcaaaagccagcagaaacgaacaaaaacaaacagccacaaggggttaatcagcaatcagctggaaatcaaccaaataaaattcgagacggaaagaagaatgacgtgcagaataatcaatttaacaaaaacaagaagaataacaacaacaaaaaaaataaacgcaacaacaacaataataaaaaccaacatcagcaaaagcctgtaaagccgaaaaaagagcttcctgagaaaattacattctctggcactttaacagttggcgcacttgctgaagagcttggcaaagagccttcagaactcattaaaaagctgatgcttcttggcgtaatggctaccattaaccaagagcttgataaagacacaatcgaactcattgcatcagaatatggtgttgaaacagaagaggtcattgtgcttgaagaaacagagctggaaaaatacgaagagcctgataatgaagaggatcttgaaattcgtcctcctgtcgtgacaatcatgggccacgttgaccatgggaaaacaacgcttcttgacagcatccgtaaaacaaaggttgttgaaggagaagcaggcggaatcactcagcatatcggcgcttatcaaattgaagagaacggcaagaaaatcacgttcttggatacaccgggccacgccgcatttacaacaatgcgtgcacgcggtgcagaagtaactgatattacgattcttgtcgtagctgccgatgacggtgtcatgccgcaaacagttgaagcgattaaccatgcaaaagcagcagaggttccaatcatcgtagctgtgaataaaatagataaagaatccgcaaaccctgaccgtgtgatgcaagaactgacggaatacggtcttgtccctgaagcatggggcggagaaaccatttttgtgccgctttccgctttaactggaaaaggcattgatgagctcgttgaaatgattttgcttgtcagtgaggtagaggaactgaaagcgaatccgaaccgtcaggcaaaaggaacggttattgaagctgaactcgataaaggcagagggtcagttgcgacgttgctcgtacagactggaacactgcatgtcggtgatccgatcgtagtcggcaatacatttggccgtgtccgtgcaatggtcaacgacattggccgccgtgtgaaaactgccggcccgtcaactccggttgaaattaccggtttgaatgatgtccctcaagcgggagaccaattccttgtctttaaggatgaaaaaacagctcgttctgtcggtgaagcccgtgcttcaaaacagcttgaagagcagcgcagcgataaagcgaagctcagtcttgatgatttattcgagcaaattaagcaaggtgatgtaaaagacatcaacctcatcgtaaaagctgacgttcaaggatctgctgaagctttaacggctgcgcttcaaaaaattgaagtagaaggcgttaaagtgaaaatcatccatacaggcgttggtgcgattactgaatctgacattatcttggcatctgcttccaatgcaattgttatcgggtttaatgtgagaccggacggaaatgctaagagtacggctgaagctgaaaatgtagatattcgacttcaccgtatcatttacaaagtaatcgacgagattgaagctgccatgaaaggtatgcttgatcctgaatatgaagaaaaagtaattggtcaagtagaagtacgccaaacattcaaagtatctaaaatcggtacaattgccggcggatatgttactgaaggaaccattacgcgcgacagcggcctccgtttaattcgtgacggcgtcgtcatctttgagggcgaagtagatgttctgaaacgctttaaagacgatgtgaaagaagtttcacaaggctatgaatgtggtattacaattaagaaatacaatgacattcgtgaaggtgacatccttgaagcgtttgtcatgcaagaaattgaaagaacgtgatcggatttgcggagtgtgaatgcatcatttatgatgcaggatcgctaaaagaaaagcgtgccgttctgaagcgggttttaactagggttcaaaacaagttcaatgtttcgatttcggagattggctatcaggacacctggcaaagaaccagcttcggaatcgccgctgtttcttcctctcgcgttcaaacagaaaaagaactgcagcgcgtcctagcgtttatcgattcttttcctgaaattgaacggacgatcactaggacagagtggttttaacttagaggtgattgaattgagtatgagagcaaaccgtgtcggcgagcaaatgaaaaaagaactcggtgatattatcagccgcaagctgaaagacccgagaattggttttctgacagtaacggatgtacgtgtatcaggtgatttgcaaattgcaaaggtgtatatctcggttctcggtgacgagaaaaaacgggaggaagcgctgaaagggctggcaaaagcgaaaggatttatccgatccgaaatcggcagccgcatcagacttcgaaaaacgcctgaaattgaatttgagttcgatgaatcaatcgattacggaaatcggatcgaaacactgattcacgaattacattcagagaaaccatctgaataaaaaaagagaggataggcgtatatcgtctgtcctctttcttcgtttataagaaaaaaactcaaaagaaggagtgaaaggcaaatggttaacggagttctccttttacataaacctgttggcatgacatcgcacgactgtgtcatgaagatccgaaagctgttaaaaacaaaaaaagtaggacatacaggaacgctcgatccggaagtatcaggcgtgcttccgatttgtgtaggaagagcgacaaaaatagtcgaatacttaactgaaaaatctaaaacgtatgatgcagaaataacattgggcttttcaaccacaacagaggatcaaaccggagaaacggtggaaacaaagcctgtcaatcacgacattgataaagcggatgtagaaaaggttttaaacagtttaaaggggaaacaagaacaaattccgcccatgtattccgctgtaaaagtaaacggcaaaaaattatacgaatacgcaagagcagggattgaagtagaacgtccgaaacgtatgataaccattgaagacattgccctgacaacagagattaaacatcatggagaaaccgcaagcttccggtttacagtgacttgctccaaagggacctatgtaaggacgctggcggtcatgatcggagaaaagctcggatatccggcccatatgtctcatttaatccgtacggcatccggagatttttctctcgacgaatgctttacttttgatgaactcgaagcacaggcccaatccggaaccgtggaagagcatacagttcctattgaacgtgcgctcaatcatttgccgaaatggatcataagtgatacattagctaagaaagtagaaaatggggctttgcttgagacgcccgagcagttttctgaaatgacaagtgaagaccgtattgccgtctttactgaatccggaacctgcttggcgatctatttccctcatcctgcaaaaaaagggctgttaaagccggcaaaagtattgatgcaaaaaagcgaacaatagaaaaaaggtgaccgttctgtgaagacgatacatattacacatcctcatcatttaataaaagaggagcaggcaaaatcagtgatggcgttaggttattttgacggcgttcatctcgggcatcaaaaggtaatcggcacagcgaagcaaatagccgaagaaaaaggtctgacattagctgtgatgacctttcatccccatccttctcacgtgttgggcagagataaggaaccaaaggatctgattacgcctcttgaagacaaaataaaccaaattgaacaattaggcacagaagttctgtatgtcgttaaatttaatgaagtgtttgcttctctttctcctaagcagtttatagaccagtatattatcggccttaatgtgcagcacgcagtggcaggctttgactttacgtacggcaaatacggcaagggaacaatgaagaccatgccggatgatttagacggaaaagctgggtgcacaatggtagaaaaattaacggagcaggataaaaaaatcagttcttcgtatatccgtaccgcgcttcaaaacggagatattgaattggcgaatgtcttgcttggacaaccttattttattaaaggaattgtcattcatggtgataaaagagggcggaccatcgggtttccgacagcgaatgtcggtttaaataacagctatatcgttccgcccacaggtgtatatgccgtaaaagcggaagtgaacggcgaagtttacaatggcgtttgcaatattggctataagccaacgttttatgaaaagcgccctgaacagccttccatcgaggtcaatctgtttgatttcgatcaagaggtatatggagccgctataaaaatcgaatggtacaaacggattcggagcgagcggaaattcaatggcatcaaagaattaacagagcaaattgagaaagataagcaggaagccatccgttatttcagcaatttgcggaaataacttgcaacgcacgcaaattttattctaaaatatttgcatataggcacgatttttagtatgatagttttcgtagtcttaaaaccattgcttggcaatccgaagtcaccgacggttgctaggtaactggggctaaatatgatttggaggtgaaacaggatggcaattactcaagagcgtaaaaaccaactcatcaatgagttcaaaacacacgaatctgatactggatctccagaagttcagatcgctatcctaactgactcaattaacaacttgaacgagcatttacgtactcacaagaaagaccaccactcacgtcgcggtcttcttaaaatggtaggtaagcgtcgtaatcttcttacgtatctgcgtaataaagacgtaactcgttaccgtgagttaattaacaaactaggcttacgtcgataatcgtaaaaagcgggaggattcccgcttttttatcgtattaaagcgaaatttcttataacaaatcattgaaatccttttacatactactttgacattgatatgttcaattcatttcgttcataataggagtaattgattatttcacacaacgaagagaggagttcgtaattgtatgggacaagaaaaacatgtctttaccatagattgggccggaagaacgcttaccgttgaaaccggccagcttgccaaacaggcaaatggtgctgtgatgatccgctacggtgatacagcagtacttagtacagcaaccgcttcaaaagaacctaaaccgcttgatttcttccctcttactgtaaactatgaagaaagattatatgcggtagggaaaattccgggcggatttattaaaagagaaggacgtccaagtgaaaaagcggttcttgccagccgtttaattgaccgtccgatccgtcctttgtttgccgatggattccgtaatgaagttcaagtcatcagcattgtcatgagtgttgaccaaaactgctcttcagaaatggctgccatgttcggttcatctcttgcactttctgtatcggatattccgtttgaaggaccgattgcaggggttactgtcggacgcattgatgatcaatttatcattaacccgacagtcgatcagcttgaaaaaagcgatatcaatcttgtcgttgccggcacgaaagatgcgattaacatggtagaagcgggagcggacgaagttcctgaggaaatcatgcttgaggccattatgttcggccatgaagagattaaacgcctgattgcattccaagaagaaattgttgcagcagtcggcaaagagaaatctgaaattaagctctttgaaattgatgaagagcttaatgaaaaagtaaaagctttggcagaagaggatctgctgaaagccatccaagttcatgaaaagcatgcccgtgaagatgccattaacgaagtgaagaacgcagttgtggcaaaattcgaggatgaagaacatgatgaagacacaatcaagcaagtgaagcagattttatccaagcttgtgaaaaatgaagttcgccgcctgattactgaagagaaagtaagaccggacggccgcggtgtcgatcaaatccgtccgctctcttcagaggttggcctcttgccaagaacgcacggttcaggtctatttacaaggggacaaactcaggccctcagcgtatgtacgctaggtgctctgggagatgtgcaaatccttgacggcttaggtgtcgaagagtcgaaacggtttatgcatcattacaacttcccgcaattcagcgttggggaaacaggaccgatgcgcggaccgggacgtcgtgaaatcggacacggagcactgggtgagcgtgcgcttgagccagttattccgtctgaaaaagacttcccttatactgtccgtcttgtttcagaagtgcttgaatcaaacggttctacatctcaagcaagcatttgcgcaagcacacttgcaatgatggatgccggtgtaccgattaaagcgccagttgctggtattgcgatgggtcttgtcaaatcaggcgaacattacactgtcttgactgacatccaaggcatggaagacgcgctcggagatatggactttaaagtagcgggaactgaaaaaggcgtaacggccctgcaaatggacattaaaattgaaggcctttccagagagattcttgaagaagcgcttcagcaggcgaaaaagggcagaatggaaatcctcaacagcatgcttgcaacattaagcgaatcaagaaaagagctttctcgatatgcgcctaagatcttaacaatgaccattaatcctgataaaatccgcgatgtcatcggaccaagcgggaaacaaatcaataagatcatcgaagaaaccggtgttaaaattgatattgagcaggacggcacaatctttatttcctctacagatgaaagcggcaaccaaaaagcgaaaaaaatcatcgaagaccttgtgagagaggttgaagtcggccaactttacctaggtaaagtgaaacggattgaaaaattcggggctttcgttgaaattttcagcggaaaagacggtttggtgcacatttcagagcttgcgcttgaacgcgtagggaaagttgaagatgttgtgaaaatcggagacgagattcttgtcaaagtcactgaaattgataaacaaggacgagtgaatttatcccgcaaagcggtgctccgtgaagagaaagaaaaagaagaacaacaatcttaaatgaaaacataaaaggagcctgggagacccggcttctttattttgaagcttttcaaaagcaggcgggttctaccttgtccctctccttcataatgtgagatgaggggggacagaacatgtacaaaaaatttgtaccgtttgccgtttttttatttcttttttttgtctcatttgagatgatggaaaatccgcatgcacttgattatataggggcaatgaaaaaagatacggtgactgtcacggcgtcaaaagacccgttatatgaagaattgcttcaaaaagcgccggagtacgaagttaagccccagaatgcaagaattgataaagtgtggaaaagcattccaggctacaatggattaaaggtcaatattgaacaatcatataaaaaaatgaaacagcatggtgagtttcgggaaaaagatttggtgtacagtcaagtaaaaccaagtgttcatcttgagtcacttcagcctgagcctatttataaaggaaatcctgacaaaccgatggtggcttttttaatcaatgtggcatggggaaatgagtatttggaaaaaatgcttcctattctgcaaaagcaccaggttaaagctacgttctttttagaaggcaattgggtgagaaacaatgtacagctcgctaagaagattgcaaaagacggacatgaaatcggaaatcattcatacaatcatccggatatgagcaaactgactacaggaagaatttccgagcagctcgacaagactaatgaacaaatagaacaaacgatcggcgttaagccaaagtggttcgctccgccaagcggaagtttcagaaaagcggttatcgacattgcagcagagaaacagatgggaacagtcatgtggacagttgatacaatcgattggcaaaagccggctccgtctgtacttcagacgagagtgttaagcaagatacataatggtgccatgattttaatgcatccgactgaccctacggcggaaagtcttgaagcgctgattacacagataaaagacaaaggatatgcgcttggaacagtcactgaactaatggatgaaacaagactattgaagtaacagatgaaggcagcttgtctttgaataggaggaacaaatttgattaaacgatatacgtgtcaaaatggtgtaagaattgtgctggaaaataacccgacagtccgttctgttgcgatcggcgtatggatcggcacaggttcgagacatgaaacgccggagataaacggaatttctcactttttagagcacatgttctttaaagggacgagcacaaaatctgcacgcgagatagcagaatcttttgatcgtattggcggccaggtcaatgcgtttacttcaaaggaatatacctgctactatgcaaaggtgcttgacgagcatgcgaattacgcgctggacgtattagcagatatgttctttcattcaacgtttgatgaaaacgagctgcaaaaagagaaaaatgtagtatatgaagaaattaaaatgtatgaagatgcgccggacgacattgtacatgatttactgagcaaagccacttacggcaatcattctttaggctacccaattctaggcacggaagaaacgcttgcttcctttaacggtgactctctcagacaatacatgcatgattattatacgccggaccgagtggtgatttcggtagcgggcaatatatctgacagttttatcaaagatgtagaaaaatggttcgggtcatacgaggcgaagggcaaagcgacaggccttgagaagcctgagttccacacggaaaaactgacgagaaaaaaagaaacagagcaggctcatttgtgccttggatttaaaggcttagaggttggccatgaacgtatttatgatttaatcgtcctcaacaatgtgctcggaggcagcatgagcagccggctgttccaagatgtgcgtgaagataaaggacttgcttattctgtttacagctatcacagctcatatgaagacagcggaatgctaacgatttacggcggaacgggtgcaaatcagcttcagcagctgtcggaaacaattcaagaaacccttgccacattaaaacgtgacggcattacctcgaaagaactggaaaacagcaaagagcaaatgaagggaagcttaatgctgagcttagaaagcacaaacagcaaaatgagccgaaacggaaaaaatgaactgctgctcggcaaacataaaacattagatgaaatcatcaatgaattaaacgccgtgaacttagagcgtgttaacggccttgccagacaattgtttactgaagactatgcattagcacttatcagcccttccggcaatatgccgtcttaaaaaggaaagcctgctccataatggagcaggcattttttaatccctttcatcatacatagtacaagggggtgacagacatgcggctcagtgaattatcaggaaaggaaattgtagacatcaaaagagctgaacggctcggagtgctcggccagaccgatttggaaatcaatgaacaggatggacagattacagcactcctcattcccacagttaagtggtttggtttgagaaagcaaggtcatgacattcgtgtcccatggcaccatattcaaaagatcggttcagatatgattatattagatgtacctgaggaaatgcctcctcgacaagagtaaatagcccaattgactgtgaagcgggctctaaagaaaacatctgaaacatcggctgccggagccgatgtttttttatatggaaaaagcgcatcttttatattcaccggtatttccttttgatcataagatgaaggggagcttaacaactagagatccagtatatacaaagaaggtgaacgtttagaatgttaaccggattgaaaattgcagttatcggcggtgacgcaagacagctcgaaattataagaaagctcactgaacagcaggctgacatctatcttgtcggttttgaccaattggatcacggttttaccggggcagtaaaatgcaatattgatgaaattccttttcagcaaatagacagcatcattcttccagtatccgcgacaacaggagaaggtgtcgtatcgactgtattttcgaatgaagaagttgtgttaaaacaggaccatcttgacagaacgcctgcacattgtgtcattttctcaggaatttctaacgcctatttagaaaacattgcagctcaggcaaaaagaaaacttgttaagctgtttgagcgggatgacattgcgatatacaactctattccgacagtagaaggaacgatcatgctggctattcagcacacggattatacgatacacggatcacaggtggccgttctcggtctggggcgcaccgggatgacgattgcccgtacatttgccgcgctcggggcgaatgtaaaagtgggggcaagaagttcagcgcatctggcacgtatcactgaaatggggctcgttccttttcataccgatgagctgaaagagcatgtaaaagatatagatatttgcattaataccataccgagtatgattttaaatcaaacggtactttctagcatgacaccaaaaaccttaatattggatctggcctcacgtcccgggggaacggattttaaatatgccgagaaacaagggattaaagcacttcttgctcccgggcttccagggattgtcgctcctaaaacagctgggcaaatccttgcaaacgtcttgagcaagcttttggctgaaatacaagctgaggaggggaaataaggatgtcgtcattaaaaggaaaaagaatcgggtttgggctgaccgggtcgcattgcacatatgaagcggttttcccgcaaattgaggagttggtcaacgaaggagctgaagtccgtccggttgtcacatttaatgtaaaatctacaaatacccgatttggagagggcgcagaatgggttaaaaaaattgaagacctgactggatatgaggccattgattcgattgtaaaggcagaacctcttgggccgaagctgccccttgactgcatggtcattgcgcctttaacaggcaattcaatgagcaagctggcaaatgccatgacggacagcccggtgctgatggcggcaaaagcgacaatccggaacaatcggcctgtcgttctgggtatctcgacaaatgatgctcttggtttaaacggaacaaatttaatgaggctcatgtcaacaaaaaatatcttttttattccattcgggcaagatgatccatttaaaaaaccgaattcaatggtagccaaaatggatctgcttccgcaaacgattgaaaaggcactcatgcaccagcagcttcagccgattctagttgagaattatcagggaaatgactaaatttacagaaaatctttcccaaactaaaaaattcggtcatagcccgcatattctatggtaaaataaaacgtaaaatcatagtcaaatcaattcaatgaagctgattggcggaaggagttttacagatgggaagaggtttacacgtagctgttgtcggagcgacaggggctgtgggacaacaaatgcttaaaacacttgaagacagaaactttgaaatggacacacttacattgctatcttcaaaacgctctgcggggacaaaagtcacgtttaaaggccaagagctgactgttcaggaagcttctcctgagagctttgaaggggtaaatattgctttgttcagcgccggcggaagcgtatcacaagcattggcaccagaagctgtaaaacgcggcgctattgttatagataatacgagtgcgttccgcatggatgaaaatacaccgcttgttgtgccagaagtgaatgaggcagacttgcatgaacacaacggcattattgccaatccaaactgctctacaatccaaatggttgcggcacttgaaccgatccgcaaagcatatggcttaaacaaggtcatcgtatcaacttaccaggcagtatcaggagcgggtaatgaagctgtaaaagagctttacagccaaacacaggcgattttaaataaagaagaaatagagcctgagatcatgcctgtaaaaggtgacaaaaaacactatcaaatcgccttcaacgcgattccgcaaatcgataaattccaagataacggctatacgtttgaggaaatgaaaatgataaatgaaacgaaaaaaatcatgcacatgcctgaccttcaagtagcggctacatgtgtgagactgccaatccaaactgggcactcagagtccgtctacatcgaaatagaccgtgatgacgctacagttgaagatattaaaaatctattgaaagaagctccgggcgtgacacttcaggatgatccaagccagcagctttatccgatgcctgctgatgctgtcggcaaaaacgatgtgtttgtgggccgcatccgtaaagacttggacagagcaaacggttttcatttatgggttgtttctgataacctattaaaaggcgcggcatggaactctgttcaaattgcagaaagcctgaaaaaactaaacctcgtataaaagagagaattttctaaagacgaatagaagagagtaaggcgctatcagcctgctctcttctgttacgtccgaataatttggagtgaaaacagtgaagataattgttcaaaagttcggcggaacatcagtaaaagatgataaaggccgcaaactggctttagggcatattaaagaagcaatcagtgaaggatataaggttgtcgttgtcgtttcagcgatgggccgaaaaggagacccgtatgcaacagattctttacttgggctgctttacggcgatcagtcagcgatttctcctagggaacaggatttgcttttatcttgcggagagactatttcctctgtcgtctttacaagcatgctgcttgataacggtgtgaaagcagctgcgctgacaggggctcaggctggctttttaacgaatgatcagcataccaatgcgaaaatcattgaaatgaaaccggagcgtttattcagtgtgctcgccaatcatgatgcggtagtcgtcgcaggcttccagggcgcaactgaaaagggtgatacaactacaatcggcagagggggcagcgatacgtctgcagccgcactcggagcagctgttgatgcggaatacatcgatattttcaccgatgtagaaggcgtgatgactgctgacccaagagtggtggaaaatgcaaaaccgcttcctgttgtgacgtatacggaaatctgcaacctggcgtatcagggggccaaggtcattcatccgcgtgctgtggaaatcgcaatgcaggccaaggttccgatccgcgtccgttcgacttattcgaatgataaaggtacattggtgacatcacatcactcttccaaggtcggcagtgatgtttttgaaaggctgattacgggaatcgcccatgtcaaagatgtcacgcagttcaaagtgcctgcgaaaatcggccagtataacgttcagactgaagtgttcaaggctatggcaaacgctggaatcagtgtcgatttctttaacattacacctagtgaaatcgtctatacggtagccggaaataaaacagaaacagctcagcgtattttaatggatatgggctatgatccaatggtgacgagaaactgcgcgaaggtatcggcggtcggcgcgggcattatgggtgttcccggtgttacgtccaaaattgtatcggctctttcagaaaaagaaattccgatccttcagtcggctgacagccatacgacgatatgggtgctcgtccatgaagcggatatggttcctgctgtaaacgctttgcatgaagtgtttgaactttcgaagtaaatgtgattgaatcatgatgaggtgaataaaatgaatttcggaaatgtgtctacagcgatgattacaccctttgacaataaagggaacgtagactttcaaaaactgtctacactgattgattacttgttgaaaaacggaacggattctttagtagtagcgggaacaactggagaatctccgaccctttcaactgaagaaaaaattgcgctttttgaatatacagtaaaagaagtaaacggacgggtgcccgttatcgctggtactggaagcaacaacacgaaagattccattaagctgacaaaaaaagctgaggaagcgggcgtggacgctgttatgcttgttaccccgtattacaataaaccttctcaagaaggaatgtaccagcattttaaagcaattgcggcagagacatctcttccggttatgctctataatgttcctggccgtacggttgcttctcttgctcctgaaacgacgatccgtttggcggcagacattccgaatgtggttgcgattaaagaagcgagcggagacctcgaagcgattacaaaaattattgctgaaacacctgaagacttctatgtctattcaggggatgacgctctgacgcttccaattctttcagttggaggaagaggagttgtgtcagtggcgagccatattgcaggcactgatatgcagcaaatgatcaaaaattatacgaatgggcaaacagctaatgcggcactgattcatcagaaactgctgccgattatgaaggaactgtttaaagcgcctaatcctgctccagtcaaaacagcgcttcagctgagaggtcttgatgtcggttctgtgcgtctgcctctagtcccgttaactgaggatgaacgtctgagcttaagcagcacgatcagcgaactgtaagaaaatttcatacagtgaaacaaacgcggtcattctcacattcagctgagtttgaccgtttcttttacatattggttttccctaaaccttctgctttatcttgttttctaaatttactttcagttataataggaacaagtgatgatggacgggtatgagactaggaggatatagattttgaaaaagaaaaatacagaaaacgttagaattatcgcccttggcggtgtcggagagattgggaagaacctttatgtcattgaaattgactcagacatatttgtcgttgatgccggccttatgcatccagaaaacgaaatgctcggtattgatgtagtgattcctgacatatcatatttgattgaacgggctgaccgcgtcaaggcaatctttttaacgcacgggcacgatgaaaatatcggcggcgttttttacttattaaacaagctgtccgttccagtgtacggaacaaaattgacgcttgcactgttaagagagaaattaaaacaatacggacataaccgaaaaactgatttaagagaaattcactccaaatctgtcattacatttgaatcaacaaaggtatcgttctttagaacgattcacagcattcctgattctgtaggtgtgagctttaaaacatcacttggatctattgtatgcacgggagacttcaaatttgaccaaacacctgcacttaatcagacgtgcgacattggcgagatcgccaagatcggcaatagcggcgtgctcgctctgctttctgacagtgcaaatgcggaacggccgggttacaccccttcggaagcggctgtcagcggagaaatttcggatgcgctgtataattcacagaaccgggtgattattgctgttttcgcatccaatattaaccggattcagcaagtcattcatgcagcggctcaaaatggcagaaagattgccgtagccggaaaaaatcttcaatctgtcctgcagctggcgagaaagttaggatacattgaagcagatgatgaattgtttatttctgtacaggatgtcaaaaaatatccgaagcgcgaagtggccattattacagccggaagccaaggtgaaccattagctgctttgacaagaatggcaaacaaagctcacaaacagctgaacattgaagaaggggatacggtggtcattgcgtcaactccgattcccgggcaggaactcatttactctaaaacagtagatcttcttgcgagagccggtgcacaagtcatctttgcccaaaagcgtgttcatgtatcaggccacggctcacaagaagagttaaagctaatgatcaacctgcttaaaccaaaatatttgattcctgtaaacggcgaatacagaatgcaaaaagctcattcaaaaatcgctgaagaaaccggcatgaagcgcagcgacatcttcttaattgaaaaaggcgacgtcgttgaattccgcggccaaaacgtaaaaattggggataaagttccttacggcaatattttaattgatggtttaggtgtcggtgatatcggcaatatcgtattgagagaccgccgcttgctttcacaggacggaattttaatcgttgtcattacacttgataaacaaaagaaaaatcttgtatcaggaccagaaattatcactcgcggctttgtttatgtaagagagtctgaaggtctaatcgtacaggctactgagctcgtccggtccatcgtgacagaagcgactgaaacatcaaatgtcgaatggtcaacgctgaagcaggcaatgcgggatgctttgaaccaattcctttatgaaaaaacgaaacgtaaaccgatgatcatcccaattattatggaagtataatgactgactaaagaccggagttgctccggtctttattttttgtccttcaagccgggattgaatgaagtatctttgttcataatacaaagagaaactcggaaaggatgaaagcgagatggatcatcgtatggaaaacacagaagaagagcgtcctgaaaaaaatgatgcgaaggacagcattatgaataaaatacagcagcttggtgaaacgacgcttccgcagctgccccaagatacaaatattcattgtctgaccattatcggacaaattgaaggccatgttcagcttcctccgcaaaacaaaacaacaaaatatgaacatgtcatcccgcagattgtggcaattgaacaaaatcccaaaattgaaggcttgctgatcatattaaatactgtcggaggagatgttgaagctggtcttgccatagcggaaatgcttgcatctttatcgaaaccgaccgtttctatcgtgcttggcggggggcattccatcggcgttccgattgctgtatcctgtgattacagctatatcgccgaaacagcaacgatgacgattcatccagttaggctcaccgggctggtcatcggggtgccgcaaacgtttgaatacctggataagatgcaagaaagagttgttaaatttgtgacaagccattccaatataaccgaagagaaatttaaagagctaatgttttcaaaaggaaacttaacacgcgatatcggaacaaatgtagtcggtaaggatgcagttaaatacggattgatcgatcacgcaggcggtgtcggacaggcaatcaataaactgaatgagctcatcgacgaagcaaggaaagaagaaggacggatgattcaatgattctttataccgtgatgccgcaggaaattgtgtttgcagaacagaaccaagagacaagcgcacatgagcaaattgaatataaaggtgtaccgcttctagtcgaaatgaaagggaatgaagcggaagtcattcaaatcatgagcaccaatccaatgcattttctgcatccggacatttcacccggacaaaagctgaaattaaacgtataagaatccaacccttttttaagggcaaaatatgctataataggggaatcctacagaaaaaacgcagcctgtaaacggctgctttcttcattatgtatgaacttacattttttaacgcagtaaggtgatgagtgtggcaaagaaaaaacgaaaatcaagaaaaaaacaggcgaaacagctaaatataaaatacgagctcaacggattgctgtgtatagccatttcaattatcgcaatcttgcagctgggggtagtcgggcaaacgtttatctatttgttccgcttttttgctggagagtggtttattttatgcttgttaggtttattggtgttaggagtctcactgttttggaagaaaaaaaccccaagccttttaacgagacgaaaggccgggttgtactgtatcatcgcaagcatattgctgctttctcacgtgcagctatttaaaaatttgacgcacaaagggtctattgagtctgcaagcgtggtgcgcaatacgtgggaattgtttttaatggacatgaatggcagctctgcttcacctgatttaggcggagggatgatcggtgcgctgctgtttgcggcttcacactttttgtttgcgtcgactggttctcagatcatggcaattgtcatgattttgatcggaatgattttagtaacaggacgctcgctgcaagaaacgctaaaaaagtggatgagcccgattggacgttttataaaagaacaatggttagcatttattgatgatatgaaatccttcaaatcaaatatgcagtcatcgaaaaaaacgaaagcgccgagcaaaaaacaaaaaccggcccgcaaaaaacagcaaatggaaccggagcctcctgatgaagagggggattatgaaacagtatcgcctcttattcattcagagccgattatctcaagcttttctgatcgtaatgaagaggaagagtctccagttatagaaaagcgccccgtacctgtgtcgaagccgcttcaggacatccaaccggagacaggtgatcaggaaactgtttctgctcctcctatgacctttacagagcttgaaaataaggattacgagatgccgtcactggatttgctggcagatccgaagcataccggccagcaggctgataaaaagaatatttatgaaaatgccagaaagcttgaacgcacattccaaagctttggcgtaaaggcgaaagtcacacaggttcatctcggaccggctgtaacaaaatatgaagtatatcctgatgtcggagtgaaggttagcaaaattgtcaatttaagcgatgatttagcgcttgcgcttgctgcgaaggatatcaggatcgaagcgcctataccaggcaaatcagcaatcggaattgaagttccaaacgcagaagtggcaatggtttcgctgaaagaagtgctggagtctaaattgaatgacagaccggatgcgaagctgttaattggactcggccgcaatatttcaggtgaagctgtattggctgagttaaacaagatgccccaccttttggtcgcaggcgcaaccggtagcgggaaaagtgtctgtgtcaacggcattattacaagtattttaatgcgggcgaaaccgcatgaagtgaaaatgatgatgatcgatcctaaaatggtagagctaaatgtctacaacgggattccgcatttgcttgctcctgttgtaaccgatccgaaaaaagcgtcgcaggctttgaaaaaggttgtcaatgaaatggagcggcggtacgaattattttctcatacgggtacaagaaatattgaaggatacaatgattatataaaacgcgccaacaatgaagaaggagcgaaacagccagagctgccttatattgttgtcattgtggacgagctagccgatctcatgatggtcgcttcatctgatgtggaagattcgattacgagattgtcccaaatggcgcgggctgccggcatccatcttattattgcgacacagcggccatcggtggatgttatcacaggggtgatcaaagcgaacattccgtcacgaatcgcgttcagcgtatcttcacagacggattcaaggaccattcttgacatgggtggcgctgagaagcttcttggccgcggcgatatgctgtttttacctgtaggggctaacaaacctgtccgtgtgcagggagcatttttgtcggatgacgaagtggagaaggtcgtcgaccatgtgattacgcagcagaaagcgcaatatcaagaagaaatgattcctgaggagacaacagaaactcattccgaggttactgatgaactttatgatgaagctgttgaattaatcgtcggcatgcagacggcatctgtttcaatgctgcaaagaagattcagaatcggctatacgagagcggcgcgcctgattgacgcaatggaggaacgcggtgttgtcggaccgtatgaaggcagcaaacctagggaagtattattatcaaaagagaaatatgatgagctctcttcttaatgaagggagttccgctctctatagttgtcaataataacattatgtaaactgatcacctttctatttattttttcgacaaaacatgatatagttgtcccaattgttcaataatttttatcgaaagtggtttacggaggggaaacatgtctacaaaagctgataatcggcacttgtatttgaaagtaattgaacgaattaaagaggatataaaaaatgggatctacactgagaaggaaaagctgccttctgaatttgagctttccaaaaagcttggtgtcagcagagcgacgctaagagaagccttgcggatactggaagaagagcatgtgattatcagaaggcatggtgtaggcacttttgtccattctaagccgttatttctttcgggcattgaacagctgaacagtgtaaccaagatgatagaacaggcgaatatgacccctggcacgatttttctatcatcacaagtgcttatgccgtctgaagatgatacgaagagatttcatttggcagaagggcaagaacttttttaccttgaacgagtcaggacagctgacggacagccgattgtgtattgtatagacaaaattccgatgaatattttgccgaattctttttctcatcagcaagaatctatgtttgaccttcttgagaaaaattcaggctccgtaatcagctatgcagtaactgatatagaaccgatcggctatcacgataccatttctccagtgcttgaatgcgatcctgaaacagcccttttgctgttaaaacaaacccattacgatcagcacgataaaccggtgctttattctttaaattattttagagcggataaattcagatttcatgttttgcgtaaacgattctaaaaacggacgcctgtatgtgtctgtttttttatttgcactgattcatgtttctttgtacatactttcattccggttaacgcaatatataagggatgacaagaaagtgaatgggtgaaaatgttgagagagaaaaatggaatgaaaaatattattgcattgtcttctgtcccgcttgtgatgacactcgggaactccatgctgattcctgttcttccgatgatggagaaaaagctgtctgtgacttcatttcaagtatctttaatcattactgtatattcagtagtagcaattatttgcattccgattgccggatatttgtcggatcgtttcgggagaaaaaaaatattgcttccatgcctcctcattgcaggattggggggagccgtagctgcttttgcctcgacctatatgaaaaatccttatgctatgatcttggcggggcgggttcttcaaggcattggttctgcaggtgccgctccgattgtcatgccgtttatcggcgacctgtttaaaggagacgatgaaaaggtcagcgcgggtcttggcgatattgaaaccgccaacacgtcagggaaggtactgagtcccatacttggagccttactggcttcttggtattggtttgtaccgttttggtttattccgtttttctgtttgatcagctttttgctcgtattgtttttggtggccaagcctgaagaagatgaagatgcgcctgctgtttctgagtttattaagagtgtgaagaaaatttttaaacaggatggtcgctggctttatacggtcttcattatcgggtgtgtcattatgtttttgttatttggcgtattattttatttatcagatacgctggagaacaagtatgctattgacggagtagctaaaggcggattactggcaatcccacttttgtttttgtcaaccagttcttttatagctggcaaaaagatcggtaaagataaaggccgaatgaaattttgcgttgttacaggaatgattctgttaaccctttcgtttattgccttgtggtggaaccacagtttttattttttatttgtctttttaagctttggcgggattgggattggaatggctcttcctgctttagatgcattgataaccgaagggattgaaagtgaacaatgcggaaccatttcctccttctacaatagcatgcgctttataggagtagctctcggtccacctgtttttgctgcattaatgtctaatgcaaactggattattttcatactctcggcgttttgcagcatcgtttctttatttttagtgctctttactgtagatgctaaaaaaagtgaagaagaagaaaaaaacttagggacggtctagccagccgtctttttttgcgcttccttgcacagtttacaactgtacctatacagcatgcggaggttattgtttccttataaatcctacagttgctataattacatgaaagagtgtttctgcgaatgctgaaaattggtcataatacatactaattaagaaatgaacgaaggaggttccatatgtcatatgttaatgaactcaaatcaaagcacggcggtttaaccgcacacattgtaaaaacagaaaaattcaaaaccgtctcgcttatttttaagatgcttgcgccgctgacaaaggatcaagtcaccaaaagagcgctgcttccgcatgtgcttcttcgcggaacgaaaagccatccgaaaaccgcagaattgcgttcatacctggatgagctgtacggcacgtcagtatcggctgaccttacgaaaaaaggagagcggcacgtcattacgttcaggcttgaaatcccgaatgaaaaatatttaaaagaccaaacgccgctacttgagaaagggctccagcttcttgcagaaatcgtcttttcacctgctttagagggagacgcttttcagtcacaatatgtggctcaagaaaaacggacgcttaagcaaagaatccaagccgtctatgatgataaaatgcgctattcgaatttaaggctgatacaggaaatgtgcaaaaatgagccttacgcgcttcatgtcaatggtgaaatcgacgatgttgatgacattacggcagagcaattatacgaaacataccaaagcgctatccaaaaagaccagcttgatctatatgttgttggcgatgtggacagtaaccaggtacaatcggcaattgataagtatttcaaaacagaagagcgcactcttggcacgattgaaaacaatcacgctgatgaaaaagttcagccaaaagaagtaattgatgaagaggatgtcaagcaaggaaaactgaatatcggctaccgcaccagcatcacttatacagatcaggattatcctgctttacaagtgtttaacggattgttcggcggattctctcattctaaacttttcattaatgttcgggaaaaagccagtcttgcttactacgcggcttcccgtatagaaagttttaaaggcttgttaatggtgatgtcaggcattgaagtgaaaaattttgaacaggcggtttcgattattgctgagcaattccaggcaatgaaaaatggcgatttcagtgagcaggatatagcacagacaaaggccgtcattcgaaatcaagtgctggaaacgattgatacagcatacggtttatctgaatttttatatcagcaggctgctgctcaagtcgagattcctatcgaagactttcttgccaatattgagaatgtcacaaaagaggatatcattaaagccggcgaaaagattcagcttgatacgacttatttcttaaaagggacggagggtgcatcttgatcaaaccaatcgaatatgaacagcttcaggagacgctgtatcatgaaaaaatgtccaacggccttgatgtttacgttttgccgaaaaaaggcttcaacaagacatatgcggtctttacaacaaagtacggctcgatagataaccggtttgtccctttaggtaaaaacgagatggttcacgtgccggacgggattgctcactttcttgagcacaagctgtttgagaaagcggacggagacgtttttcaagatttcagtaaacagggggcttctgccaatgcgtttacgtcatttacaagaacggcttaccttttctcaagcacatcaaatgttgaacgcaatttagagacgcttatcgattttgtacaggacccatattttactgaaaaaacggttgaaaaggaaaaagggattatcgggcaggagattaatatgtacgacgataaccctgattggaggctttacttcggggtcattgaaaacatgtacaaagagcatcctgtcagaattgacatagcgggaacagtggaaagcatttcacatattacaaaagaccttctttatgaatgctatgaaacgttttatcacccgagtaacatgctccttttcattgtcggccctgtagatcctgaagcgattatttctcaggtaagagaaaaccaggggaaaaagccgtatactgatcagccggagatcaaacggaaagaagtgaaagagcaagaagcggttttccgaaaagaaaaagagatcaaaatgaacgtgcagggaccgaaatgccttgttgggctgaaatccaaaaatccgtttaaattaggcaaagagctcttaaagcatgaactttcaatgaacttattgcttgaagctctttttggcaaaagctctgcccagtatgaatcactttatgaaaaaggatatattgacgaaacgtttagctttgattttactgctgaatatgggttcggttttgcggcgatcggcggagatacgcctgagcctgatcaattagctgaagacatttcaagcatgcttttgcgcgccggtgaactgattactgctgaaaagattgaacttgccagaaagaaaaagatcggcacattcttaaaagcgctgaattcccctgaatacatcgccaatcaatttacccgttatgcgttcttggatatgagcctgtttgacgttgtaacggtactcgagcagattaccctcgaggatgtccagaacgtaatacaagaggaaatcgctgcagacaggctgactgtctgcaaggttgttcctaaatcataaacaaaacatccctccagtgtgaggggtgtttttctgcggaaagaaggaaagagaatgaacaaaacagcactaatcaccggagcaagcggcggcattggcaaaagcatcagcgaaacccttgcggctaaggggtacaatctgctgctgcattacaatacaaatcaaaatgcggcagcggagcttgctgaaaaactaagtcagatgtttggcgtaaatacggagatattacaagctgatctgtccgcgcaagatggagcagataagctgacaagttcaattgttcagccggttgatgcgattgttttaaacagcggacgaagccattttgggctgattacggatgtagataacgcaacggttcaggaaatggttcagcttcatgtagcgagtccgtatatgctgacgagaaaccttctgccaggcatgattcggaataaatcgggagcgattgtggctgtcagctcgatttggggagagactggggcatcctgtgaagtgctgtacagcatggcaaaaggagctcagcattcgtttgtaaaaggattggctaaggagctggcgccaagcggaatcagggtaaacgcagtagcgccgggcgcagttgatacaaatatgatgaatcaatttaccccggctgaaaaagaagagatcgctgatgagattccgatcggccggctggcccggccgcaagaaattgcggatgcaacagcttttctcctgtctgaaaaagcgtcatatatcaccggccaaattctgtcggtgaatggcggctggcactgctgatccgaaaatattcggtgtatagtttcttttgcgaaggacacaataatcttgtaacttcacatgaaatggaggaaacaagcatgtcagtattagaaaactgggatagctggaaaaacttccttggcgaccgtctaaactatgcgcaagataaaggtatgagccaggatacgattacagatcttgcgacagaaatcggcagctacttggctaatgaagtggaatctaagaacgagcaggaaaaagtgctggcagatctttggagtgtagcatcaaaagatgaacagcacgccattgccaatatgatggttaagcttgttgaaaataacagcactcactaggaagagaggggatttttcctctcttttttatgttttcctcatcacagcaacattcttctttctaattagagaaaaatgctttatgataaaggaaggtaaaattttgccacaatgaagggggtatatcatttggcaaagctcgaatggtattttgaatatgaaattcaagtgaaccgccccggactgctcggggatatttcatctcttcttgggatgctttctatcaacatcgtaacgataaacggcgtcgatctttccagaaggggaatgctcctcaggtgccgccatatagatcaaattaaacgattagaatcaatcttaaaaacgatggaaacaattaaagtaacgaagcttagagaaccgaggcttcgcgaccgtcttgccgtacgccacggccgttatattcaacgggatgccgatgacaagaaaacgttccgctttgaacgggacgagcttggcttattagtcgattttatggccgaattgttcaaaaaagaaggccataaattaatcggaatcagaggtatgccgcgtgtggggaaaacggaatcgattgtagcctctagtgtgtgtgcaagcaaaaggtggctgtttgtgtcatcaaccttgctgaagcagacgataagaagccagctgattgccgatgaatacagcactgaaaatgtctttatcgttgacggaattgtgtcaacacgaagaggatcggaacgccatctccagctggtccgagaaatcatgcggctgcctgcaacaaaagtggtggagcatccggacatattcgttcaaaatacagagtatacattagatgactttgattatattattgaactgagaaatgaccctgatgaggttattacatatgaacatgccgaggaaccccaaatgtttgatcaatccgggttttcaagctttgatttttaaaattggaaggtgtttgttgtgactgaactaggaatccggctcaaagaagccagagaggaaaaagcaatgtcattggatgatctccaagcggcaacaaagattcaaaaaaggtatttaaccgccttggaggaaggaaactatgacattattccggggaagttttatgttcgggcattcatcaagcaatatgcagaagccgttgggcttgatgcggatcagctgtttgaggagcataaaaaagatatccctaatacgtatcatgacgatgtgtctgaaaagatctccggcatgaatcttcaaaaggaaatgccaaagccagcatctaaggcgctggagctgctgccaacgatacttgttattctcggcgtgattgttgtgattgccattgtgtacgcgatcattcaatttgccaatcacaaaaacagtgatgatcacaatgcggcatcagaaaaagcaattacgcaaagtgagagcaaatacgaaatccctaaagattcaacgctgaaagagaatcaaaataacagctctgaaaaagagacagacactaaaaaagaaacgaaagaaaacgaagataagaaaaaagaaaatgacagtgagaagctggagattaaagctgctggcactgaaggatcgttaacgacttatgaagtgtccggcgctgataaaatcgagctggaactgaaggcatcagacagctcgtggattcgagtgcgcgatgaaaacagcagctctttaaaagaaggaacgctgaaaaaagacgaaacctataaaaaagacataactgatcagaaacaagttgatatccgcaccggatatgcacctaatctgaaaataaaaatcaacggtaaggttctttcatatgaacttgatccgaaaaaagtgatggcacaaaccataaagattgtaaataaaaaggaagaaaagtcatcttaattatcagatgacttttcttcacgtccgagtatgaaattggaggggctttatgtttaacttaccaaataaaatcacactagctagaatcgcattaatcccaatcttcatgattatcatgctggcgccgtttgactggggcaggctcgaagttggagacgaatcaatcccggtcgcacatttggcgggggccattctatttattattgcatctacaacagactgggtggacgggtattatgcccgaaaattgaatctcgtaacaaacttcgggaaatttcttgatccgcttgcggacaaactgctcgtatccgcagcgttaattatccttgttcaatttgatctcgctccagcttggatggtcattgtgattatcagcagggagtttgccgtgacaggtttaaggcttgttttggccggaacaggagaagtcgtagctgctaacatgcttggtaaaatcaaaacctgggcacagattattgcggtatccgcattgcttcttcataatcttccatttgaacttgtgtcattcccgtttgcggacttggcgctgtgggtagccgtcttctttactgtcgtttcaggctgggaatatttctctaaaaactgggaagcgttaaaaacatctaactaagaaagaaggacttcgtcatggaatttccaaaaaaagcagaaataattgcagtcggttcagagctgctgcttggccaaatcgccaatacaaatgctcaatttatcagcaaacagctcgctgaaatcggggtcaacgtattttatcatacagcggtcggagataacccggagcggctgaagcaggtcatccgcattgctgaagaacgctctgacttcattattttttcaggagggcttggacccacaaaagatgatctgacgaaagaaacgattgcaaatacgctgggacgtccgcttgtgttaaatgatgaggcattccaatccattgaggactatttcaaacgaacaaaacgcacgatgtcacctaataaccgaaaacaggcgcttgtgatcgaaggctctgacgtgctggcgaatcactttggaatggccccgggaatgctcacagagcatgaatcgcgctattatatgcttcttcctggaccgccgagcgaattgcgtccaatgtttgaaaacgaggcaaagcctcttctgctgaaaaagatgggttcaaatgaaaaaattgtgtcaaccgttcttcgctttttcggtatcggtgaatctcagcttgaagccgatttggaagatattattgatgcacaaaccaatccgacaattgcgcctttggcggctgatggagaggtgacgctgcgtctgacagccaaacacgccgatgaaaaggaaacagagcgtctgttaaaagaaacagaggccgttatcttagagcgtgtcggtgaatttttctatggttacgatgatacttctcttgtaaaagagctatctatagcgtgtaaggaaaaaggcataacaatttctgcggcagaaagctttaccggagggctgttttctgaatggctgacggatcatagcggtgcctcaacattatttgccgggggcgttgtttgctatacaaacgacgtgaagcagaatgtgcttggtgtcaagaaggaaacattagatcgttttggggcggtcagcaaggagtgcgcatccgaactggctaagggtgttcaaaaactcactggcagcgatatcggcattagctttactggtgtagcaggacctgatgctcaagaagggcatgagcctgggcatgtgtttatcggcatttccgcaaacggtaaagaagaggttcacgagtttcactttgcgggctccagaacggggatcagaaaacgcggcgctaaatacggctgccatttaatcttaaagcttttagagcaaaaataatattttcagcacattatcctcctaagaaaacatgatttctctgatacattatgatattttgataggaatcacgccaagaaaaaatccgaatatgcgttcgcttttttcttggcaaatcccttcaaacagggtatagtatatgtagtggtaacataaaggaggaaaaaatagaatgagtgatcgtcaggcagccttagatatggctcttaaacaaatagaaaaacagttcggcaaaggttccattatgaaactgggagaaaagacagatacaagaatttctactgtcccaagcggctccctcgctcttgatacagcactgggaattggcggatatcctcgcggacggattattgaagtatacggtcctgaaagctcaggtaaaacaactgtggcgcttcatgcgattgctgaagttcagcagcagggcggacaagccgcgtttatcgatgcggagcatgcgttagatccggtatacgcgcaaaagctcggtgttaacatcgaagagcttttactgtctcagcctgacacaggcgagcaggcgcttgaaattgcggaagcattggttcgaagcggggcagttgacattgtcgttgtcgactctgtagccgctctcgttccgaaagcggaaattgaaggcgacatgggagattcgcatgtcggtttacaagcacgcttaatgtctcaagcgcttcgtaagctttcaggggccattaacaaatcgaagacaatcgcgattttcattaaccaaattcgtgaaaaagtcggtgttatgttcgggaacccggaaacaacacctggcggccgtgcgttgaaattctattcttccgtgcgtcttgaagtgcgccgtgctgaacagctgaaacaaggcaacgacgtaatggggaacaaaacgaaaatcaaagtcgtgaaaaacaaggtggctccgccgttccgtacagccgaggttgacattatgtacggagaaggcatttcaaaagaaggcgaaatcattgatctaggaactgaacttgatatcgtgcaaaaaagcggttcatggtactcttatgaagaagagcgtcttggccaaggccgtgaaaatgcaaaacaattcctgaaagaaaataaagatatcatgctgatgatccaggagcaaattcgcgaacattacggcttggataataacggagtagtgcagcagcaagctgaagagacacaagaagaactcgaatttgaagaataaaaataaaataagtttcaaatgatacaaaaggctgagtgaaaaactcagcttttttgtattttgcaaaaaaatgataaaaatattgctttttttgacaacttttttagggctttattcgtctaacaaaacgtgtgcaaaatggaatttattttgggaggaaaaaatgaatgacaagcccaacccgcagaagaactgcgaaacgcagacggagaaaactaaataaaagaggaaaactgttgcttggtcttttagcagtgatggtttgcattacgatttggaatgctcttcatcgaaatagtgaagaaaacgaaccatctcaagaaactgcagcggtttcaaataccgatcagaaaaaagaggtcaaaaagaaaactgccgaaaaatcagaggaacaaatcaaaacagtggatcgaaaccaaaaaatcagcaattatttaaaagagatcggtttcagcggaacagccatgattgtcagaaatggagaaatcgtaacaaataaaggttttggctatgctgaccgtaaacactacattcaaaataatccattgacatctttttatgtcggttcatcacaaaaagcgctaattgcaactgctattttgcagcttgaggaaaaggggaaacttcagacaagtgatccggtaagtacgtatttacctcattttcctaacggacaaacgattactttgaagaatctgcttacacatacatcggggataaacggacatattgaaggaaacggcgccattactccggacgatttaataaaagatatagaacttcagggaatcaaacgtcagccgggcgtatgggactacaaggattccaactattctgttcttgcttatattattgctgaagtaagcggtgagccctatgaacagtacataaagaatcatatttttaaacctgcgggaatgacgcatgcaggcttttacaaaacatatgaaaaagaaccttatcctgccgtcgggtataagatggagggcagcaaaacagttacaccgtatatacctgatttatcccagctgtatggagcgggtgatatttatatgagcgctatagatatgtacaaatttgaccaagcgctgatagacggaaaactgtattcgcaaaaaagctatgaaaagatgtttacgccagggagcagctccacatacggcatgggattttatgttgctcccggaagctattcaaaccatggtgttatgccgggcttcaatatcttgaacagctttagcaaatctgggcaaaccattgttattttgttctcaaacattcaaaataatgctaaattgggccaagtgaacaataaaatataccagcttctaaatcaagaatgattggcgatcttcttttggatgaattgcattcggcacgtgaaaagaagactggcctgcaaacgttaagatggcaagcttgacaagtatttccgacacatttacaatgaagttgtaacatttgtttttttaacatgattgttaaaccatttaaacttgacaagggcgatgaacacactcattccctgtgaaggttctgtatgttgagaaaactagacaatgtacatgccgacactttttaagcaacaaccaagttcatagcaagaggaggtgaaagtatgaccccaattatgatggttctcatctccattttgctgattctactcggtttagttgttggctactttgttcgtaaaaccattgccgaagcgaaaattgcgggcgcacgcggtgcagccgagcaaattcttgaagatgcgaagcgtgatgctgaagcactgaaaaaagaagctctgcttgaagcaaaggatgaaatccacaaacttcgaatagatgctgaacaggaagttcgtgaaagacgaaatgagcttcaaaaacaagaaaaccgtttactccaaaaggaggaaaaccttgatcgcaaacatgagggaattgataaacgggaagcgatgttggagaagaaagatcattctctgaatgaacgacaacaacatattgaagagatggaaagcaaagtggatgagatgattcgtatgcagcagtctgagttggaacgaatttcgagtctaactcgtgacgaagcgaaacaaatcattcttgagcgggttgaaaacgagctttcacatgacatcgccatcatgacaaaagaaactgaaaaccgtgcgaaagaagaggcggataagaaagcgaaaaacattctttcactcgccttacagcgctgcgcagcggaccacgttgccgaaacaacggtatcagttgtcaatcttccaaatgatgagatgaaaggacgtatcatcggacgggaagggcgtaacattcgtacgcttgaaacgctgacaggaattgacctgattattgatgatacgcctgaagctgtcattctttccggatttgatccgatcagacgtgagacagccagaattgctcttgataaactcgttcaggatggccgtattcatccggcacggattgaagaaatggttgaaaaatctcgccgcgaggtcgatgactatattcgtgagatgggtgagcaaacgacatttgaggttggcgttcatggcctccacccagatctcatcaagatcctcggccgcttaaagttccgtacaagctacggtcaaaatgtgcttaagcattccatggaagtcgcattcttggccggtctaatggcatcggagcttggtgaagacgcaaagcttgctaaacgtgcgggtcttcttcacgacatcgggaaagcaattgaccatgaagtagaaggaagccacgttgagatcggggtagagcttgcgaccaaatataaagagcacccagtcgtgattaacagtattgcatcacaccacggggacgaggagccgacttccattattgctgtactggtagctgcagcagatgcgctttccgctgcaagacctggcgcaagaagtgagacgctcgagaattatattcgaagacttgaaaaactcgaagaaatttctgagtcctacgaaggtgttgaaaaatcatttgccattcaggctggacgcgaagtgcgaattatggtgaagccggattcaattaatgatcttgaggctcatcgactggcgcgagatatccgcaagcgaattgaggacgagctcgattatccaggtcatattaaggtgacagtaatcagagagactcgagccgtagagtatgcaaaataaagtgatgcgctaagcatcactttatttttttgacggcaaggaattttcaagaagaaaggatttacaaaatgagaattttatttatcggagatgttgtcggttcaccgggccgtgacatggtcaaagaatatgtaccaaagctaaaaacaaaatataagcctcactttaccattattaatggtgaaaacgccgcacatggaaaaggcctgacggaaaaaatttatcacagcttaatccagtccggggcagatgcaatcacaatggggaaccacacatgggacaaaaaagaaatatttgattttatagatgacgttccgaacttggttcgcccggcaaactttcctgaaggaacaccggggaaagggatcacatatgtgaaagcaaacggcaaagaactagcagtcattaatttgcagggacgtacgtttttgccgccgcttgatgacccgtttttaaaagcggatgaattgatcgcagaagccgcgaaaagaacaccgtacatttttattgactttcatgccgaagcgacaagtgaaaagctcgcacttggctggtacacggatggacgggcatcggctgtagtaggaactcatacacacgtgcaaacagcggataaccgcattttgccgaagggaacggcatatattactgatgtgggaatgactggcccgtatgacggtatactggggatggacagagagacgattattaagcgattcaaaacgaaccttccagtccggtttactgtcgctgaaggaaaaacaacgctcagcggagttgtcattgacattgacgatcaaacgaaaaaagccgtgaaaattgagcgtattttaatcaacgatgatcacatgttctttgaatagttgaacatatggttattttataaaaatattaaaaagaaaagcaggaatatagcaactccttagtgaatatagtaaaaatggaaggtagcccgctatttttgaaaagcattgtggggatggctttttggatagcaacatctaataatgattgttctaatgaacactcacttatccattgtaaaactaagggggagcagaaatggaaatcttaaaagtttcagcaaaatcgagtccaaattcagtggcaggtgcgcttgcaggcgtgttgagagagcgaggagccgccgagattcaagcgatcggagcgggtgcattaaaccaggctgtaaaagctgtggcgattgccaggggatttgtggcgccaagcggcgttgatttgatttgtattccggcttttacagatattcaaatcgatggggaagaaagaacagcgattaaattaatcgtggagcctcgctaaaaacaaataaagcattctcaacctgtttgcgtaatgcaaacaggttgtttttcatttattgtgatattttctcccgatagtatttttagcacataaatgagcgaatatacaaaatcagaaatgagctaaaacgtttcaaaaaaaatttccgcccatttttcaagacagatacttttgtccttctggaaaagacagtgctgtttacgcttattccatatcatggtacaatccgaatataacaagaatttttcaaggaggattgtacatgcagagtggaaagatgaaagctctaatgaaaaaggacggggcgttcggtgctgtgctgactgaagttcccattcctgagattgataaacatgaagtcctcataaaagtgaaagccgcttccatatgcggcacggatgtccacatttataattgggatcaatgggcacgtcagagaatcaaaacaccctatgttttcggccatgagttcagcggcatcgtagaggacgtgggagagaatgtcagcagtgtaaaagtgggagagtatgtgtctgcggaaacacacattgtttgtggtgaatgtgtcccttgcctaacaggaaaatctcatgtgtgtaccaatactgctataatcggagtggacacggcaggctgttttgcggagtatgtaaaagttccagctgataacatttggagaaatcccgctgatatggacccgtcaattgcttccattcaagagcctttaggaaatgcagttcataccgtacttgagagccagcctgcaggaggaacgactgcagtcattggatgcgggccgattggtcttatggctgttgcggttgcaaaagcagcaggagcttctcaggtgatagcgattgataagaatgaatacaggctgaggcttgcaaaacaaatgggagcgacttgtactgtttctattgaaaaagaagacccgctcaaaattgtaagcgctttaacgagtggggaaggagcagatcttgtttgtgagatgtcgggccatccctcagcgattgcccaaggtcttgcgatggctgcgaatggcggaagatttcatattctcagcttgccggaacatccggtgacaattgatttgacgaataaagtggtatttaaagggcttaccatccaaggagtcacaggaagaaaaatgttttcaacatggcgccaagtgtctcagttgatcagttcaaacgtgatcgatcttgcacctgttattacccatcagtttccgttagaggagtttgaaaaaggtttcgaactgatgagaagcgggcagtgcggaaaagtaattttaattccataaagggggataaacatgacgaaggaatttgagtttttaaaagcagagcttgatagtatgaaagaaaaccatacatggcaagacataaaacagcttgaatctatgcagggcccatctgtcacagtgaatcaccaaaaagtcattcagctatcttctaataattacctcggattcacttcacatcctagactcatcaacgccgcacaggaggccgttcagcagtatggagccggcaccggatcagtgagaacgattgccggtacatttacaatgcatcaagagcttgagaaaaagttggcagcctttaaaaaaacggaggcggcacttgtattccaatcaggcttcacaacaaaccaaggcgtactttcaagtattctatcaaaagaggacattgtcatctcagatgaattgaaccatgcctctattattgacggaattcgactgacaaaggcggataaaaaggtgtatcagcacgtcaatatgagtgatttagagcgggtgctgagaaagtcaatgaattatcggatgcgtctgattgtgacagacggcgtattttccatggatggcaacatagctcctctgcctgatattgtagagctcgctgagaaatatgacgcatttgtgatggtggatgacgcccatgcatccggagtacttggcgaaaacggcaggggaacggtgaatcacttcggtcttgacggcagagtgcatattcaggtcggaacattaagcaaggcaatcggagtgctcggcggctacgctgcaggttcaaaggtgctgatcgattatttgcgccataaaggccgtccatttttattcagcacatctcatccgccggcagtcactgcagcttgtatggaagcgattgatgtcttgcttgaagagccggagcatatggagcgcttgtgggagaatactgcctattttaaagcaatgcttgtgaaaatgggtctgactctcacgaagagtgaaacgccgattcttcctattttaattggtgatgaaggtgtggcaaagcaattttcagatcagctcctttctcgcggtgtttttgcccaaagtatcgttttcccgactgtagcaaagggaaaagccagaattcgcacgattataacagcagagcacaccaaggatgaactggatcaggcgcttgatgtcatcgaaaagacggcaaaggagctccagctattgtaacaagaggaagagtttactcttcctcttttgattccttattgattattattctcaatgagtgtacaatgataggttgccagttgtgcagagcttcaataacctttatactgaagggtggaagtttggtttgaaaggagaaaatatgacatgaatgaaaaacaaaaattagagagcggacaagttaatccatcggacaaaaaatccgagaaggattacagcaagtactttgaagctgtttacattccgccttctttaaaagacgcgaaaaaacgaggcaaggaagccgttacttatcataatgactttaaaatttctgaacaatttaaaggattgggagacggaagaaagttctatatccgtacgtacggctgccaaatgaatgaacacgatacagaggttatggcagggatctttagggcgctcggttacgaagcgacaaactctgttgacgatgccaatgtcattttgttaaatacatgtgcaatccgtgaaaatgctgaaaacaaggtgtttggtgagctcgggcacttaaaagcactgaaaaaaaacaatcccgatctgattttaggcgtgtgcggctgtatgtcccaagaggaatcagtcgtgaaccgtattttgaaaaaacatccgtttgtcgatatgattttcggaacgcataacattcatcgcctgccggagcttttgtcagaagcatacctttcaaaagaaatggttgtagaagtttggtctaaggaaggggacgttattgaaaaccttccgaaagtccgaaatggaaaaattaagggctgggtcaatatcatgtacggctgtgacaaattctgtacgtattgcattgtgccttacacacgcggaaaagaaagaagccgccgccctgaggatatcattcaggaagtgagaaggctcgcaagtgaaggctataaggaaattactctgttaggccaaaacgtaaacgcgtatggaaaagactttgaagatatgacgtacggacttggtgatttgatggatgaactgagaaaaatcgatatcccgagaatccgttttacaacgagtcatccgcgcgactttgacgaccgcctcattgaagtgctggcaaaaggcggaaatctgcttgatcacattcatcttccggttcaatcaggaagctcagaagttctcaagctgatggcccgcaaatatgacagagagcgttacatggagctggtgcgaaaaattaaagaagcaatgccaaacgcttctttgacaacggacattatcgtcggatttccaaatgaaacggacgaacagtttgaagaaacgctttctctataccgtgaagtggagtttgacagcgcctatacgttcatttactctccgcgtgaaggcactccggctgctaagatgaaagataatgtaccgatgcgtgtgaaaaaagaacgcctgcagcgtctaaacgcactggtgaatgaaatttctgctaaaaaaatgaaggaatacgaaggcaaggttgtcgaagtattagttgaaggtgaaagcaaaaataaccctgatattcttgcgggctatactgaaaaaagcaagcttgttaatttcaaagggccgaaggaagccatcggcaaaatcgtccgcgtgaaaatccagcaagcgaaaacatggtcgcttgacggagaaatggtaggagaagcaatcgaggtgaaataagatgacgctctactcaaaaaaagacattgtgcagcaggcacgaaaccttgcaaaaatgatctctgaaacagaagaggttgattttttcaaacgggctgaagcgcaaatcaatgagaatgacaaagtgtccacaatcgttaatcagattaaagccctgcaaaagcaggctgtcaatctgaagcattatgaaaagcatgaagcgctcaaacaagtagaagcaaaaattgacgcgctgcaagaagagcttgaagagattcctgttatccaggaattcagagactcgcaaatggaagtaaatgacctactgcagctcgttgcacacaccatttccaaccaagtcacaaatgaaatcatcacatcaaccggaggcgacctgctgaaaggggaaaccggttcaaaggtgaagcattcaaataacagctgttctctctaaacacggtgcctttacaggcccgtgtttttttatgtgtgggttatgaactaaataatctatgtaccaaatgttcaattggtttttctgtgcgcagccgcgtgtaaactttatcgcacttataagtaaagtttctaggctcacctgcatacaatggaacagaaactttgtatttttatattttatttataaaaatgcacactagacaaatgcccagcataagataacacgaagaagaacaaggaggcatgccggaatgtctgaatacagggaaattattacgaaggcagtagtagcgaaaggccgaaaattcacccaatgcaccaacaccatctcgcctgagaaaaaaccgagcagcattttgggtggttggattattaaccacaagtatgacgctgaaaaaattggaaaaacggtagaaattgaagggtattatgatataaacgtatggtactcttacgcggacaacacaaagacagaggttgtcacagaacgggtaaaatatgtagatgtcattaaactcagatacagagacaataattacttagatgatgagcatgaagtgattgccaaagtgcttcagcagccaaactgccttgaagtgaccatttcgccgaatggaaataaaatcgttgtgcaggcagaaagagaatttttggcggaagtggtaggggaaacaaaggtagttgttgaggtcaatcctgactgggaagaggatgacgaggaagattgggaagatgagcttgatgaagagcttgaagacatcaacccggagtttttagtgggagatcctgaagaataaaaaagggactaggggagacagtacccccaagtctcttttttatattgatatatcattcttttatcactttttgtttatgttataatgaaggttggaaaatagaaacgttgatacatagtgagggattaaacaatggccggttatacgcctatgatacagcaatatttaaaaataaaggcagagcaccaggatgcctttttattttttcgcctgggtgatttttatgaaatgttttttgaggacgccaaaaaagcgtcacaagagctggaaattacgttaacgagcagagatggcggtgcggctgaaaaaataccgatgtgcggtgtgccgtatcattctgcttccgcgtatatcgaacagcttattaaaaaaggatacaaagtggcgatctgtgaacagacggaagatccgaaagccgcaaagggcgttgtgaaaagagaagtggttcagctgattacgcccggaactgtaatggacggcaaaggcatccatgaatcggaaaataattttatcgcatctgtttcagcctgctcgaacggatacggacttgcgctgtctgatttaacaacgggagaaaatttggctgttttgattgaacggcttgaagacgtcatatcagaaatttattcagtcggcgcacgggaaatcgtggtttcaggaagcttggatgccgatacagtggcacagctgagagagcggtgcggtgcaacgatctcaattgaagatggagaaacagacgaacacgtaacgatcattgagcacttaaataatgaagatataacaaaaacatttatgcgcttatatacgtatttgaaaagaacccaaaagcgcagccttgatcatcttcagcccgtgcaggtgtatgagcttgaggaagcgatgaaaattgacttgtactcaaagcgtaatctggagctgaccgaaacgattcgttcgaaaaataaaaaaggctcccttttgtggctgctggatgaaacaaaaacggcaatgggaggccggctgcttaaacagtggattgaccggccgcttatcagagtcaatcaaatcgaagagcgccaagaaatggtggaaacattaatgtcccatttctttgaacgggaagatctgcgtgaacgtttaaaagaagtatatgacttagaacgccttgccggacgcgttgcattcggaaatgtcaatgcccgggatttgattcagctgaaggaatcgttaaagcaagttcctggcatcaaacagctggttgcttcactggctcatgacaaggccaaggaacgtgcagagcgcattgacccttgcggggatgtacttgaactgctggaagaagcgctgtacgaaaaccctcctttatcggtaaaagaagggaatctgattaaagatggttataatcaaaagcttgatgaatatcgtgatgcaagcagaaacggaaaagactggattgcccgcctggaacagcaggagcgggaatacacaggcattcgttctttaaaggttggctttaataaagttttcggttattacattgaagtgacaaaagcaaatttgcacttgcttgaggaagggcgttatgagcggaagcagacgttaaccaatgcagagcgctacattacacctgaattaaaagaaaaagaagcgctcattttagaggcggaaaataacatctgtgaactggagtacgagctgtttaccgagctgcgcgagaaggtgaagcagtatattccgcggctgcagcagcttgcaaaacagatgagcgagctggacgcactgcaatgctttgcgacaatcagtgaaaatcgtcactacacgaaaccggagttctctaaagatgaagtcgaagtgattgaaggcagacacccggttgttgaaaaagtcatggacagccaggaatatgtcccgaacaactgtatgatgggcgataacagacaaatgcttctcattacaggtccaaacatgtcagggaaaagcacgtatatgagacaaatcgcgctcatttccattatggcgcaaatcggctgctttgtacccgcgaaaaaagcggtgcttccgattttcgatcaaatttttacgcgaatcggcgctgcagatgatttgatttccggacaaagtacatttatggtagaaatgcttgaagcgaaaaatgcgattgtcaacgcgacgaaaaacagcctcattctgtttgatgaaatcgggcggggaacgtccacttatgacggcatggcgctggcacaggcgattattgaatatgttcacgatcatatcggcgccaagacgctgttcagcacacactatcacgagctgaccgttcttgaggacaagctgccccagctgaaaaacgttcatgttcgcgctgaagaatataacggaacggttgtctttcttcatcaaattaaagaaggtgccgctgataaaagctatggtatccatgtagctcagcttgccgaactgccgggagatctgattgctcgcgctcaagatattttaaaagagcttgagcattcaggaaacaaaccggaagtgccggtgcagaaacctcaggtgaaagaagagccggcacagctgtccttttttgacgaagcggaaaagccggctgaaacaccaaagctttcaaaaaaagaaaagcaagtgatcgatgccttcaaatcacttaatatactggatatgacaccgcttgaagcgatgaatgaaatgtacaagctgcaaaagaaattacattaaaacggggtgatgaatgtggcaaaagtcatccagctgtcagatgagctttcgaataaaatagcggcgggcgaggttgtggaacggcccgcctcagtcgtcaaagaattggtggaaaatgcgatcgacgctgacagcacagtcattgaaatcgatattgaggaagcaggccttgcatccattcgggtcttggataacggcgaaggaatggagaatgaagattgtaagcgtgctttccgccgccacgcaacgagtaaaataaaagatgaaaatgatttattcagggtgagaacgctcggtttcaggggagaagccctgccgagtatcgcgtcagtctctcatctggagattacaacaagcactggtgaaggagctgggacgaagctcgtcctccaaggaggaaacatcatttccgaatcgcgttcctcaagcaggaagggaactgaaattgtcgtttccaacctgttttttaacacaccggcccgtttgaaatatatgaaaaccgttcatacagagcttggaaacattacagatgtggttaaccgtattgctctggcgcatccagaggtatcgatccgcctgcgccatcatgggaaaaacctgcttcaaacgaacggaaacggagatgtgcgccatgtactggcagcgatttacggcacggctgtcgccaaaaaaatgcttccgctgcatgtgagctccttggattttgaagtaaagggatatatcgccctcccagagattacacgggcgtcgagaaactatatgtcgtctgtggtcaatggccgttacattaaaaatttcccgctcgtcaaagcggttcatgaaggctatcatacgcttctgccgatcggacgccatccgattacttttatagaaattacgatggacccgattttagtcgatgtcaacgtgcatccatcgaagcttgaggtccggctcagcaaggaaacagagcttcatgacttaatacgtgacggaattaaagatgtgtttaaacagcagcagctgattcctagtgcccaggtcccgaaaaaatcagcacctgccatcaaaaatgagcagcagtttataacctttgatgaaaagcctccggaaaaaaaagttccggaaaaatcgactgcgccatcttattcaccgatgaagctcagctcagtcgtaaaagagccggttgatgcggaggaaaaattgccccctctccaatttgatgctcctcctatcgttgatcaggaacaaacccttgaggtgtccgatgtttcagcagaacagcctgaaacatttgagcaggaatgccatgaggaacagccgcagccagcgtctgatcgggttccaattatgtacccgattggccagatgcacgggacttatatattggcacaaaacgaaaacggcctatatattatcgaccagcacgccgcccaagaacgtattaaatatgagtacttccgtgaaaaggtgggggaggttgagcctgaggtgcaggagatgattgtaccgctgacgttccactactccacaaatgaggctttgattattgaacagcacaaacaagagctcgaaagcgtcggtgtctttttagagtcattcggctctaacagttacatcgtccgctgccacccagcctggtttccaaagggagaagaagcagagcttatagaagaaatcattcagcaggtgctcgactccaaaaatatagatattaaaaaactccgcgaggaagcggcgattatgatgagctgcaaaggctccatcaaagcaaatcgccacctcagaaacgacgaaatcaaagcgcttctggacgacctccgaagcacatcagacccatttacatgcccgcacggccgcccgatcatcattcaccactcgacatatgagatggaaaagatgttcaaacgcgtgatgtagcgggggtggtaggcattgatccattctctgaatggatcaatgctttttttgtactccttcgagtgtcagattataagaaacggttgtaaacgtgtgagcagtgttaaagcattatacttcatggtccctccgtataacgaaatttccatttacaggcaattagaattaatgtatattttgggtgagggggtggaaacacatggcatgtggtccgaagatcattatctttttggatgaacttgatgatccgaatgtaagaatcattttagaatgcagaatttaaattacaacattgtgttttgctccctgttcgtgtgaacagggagttttttcgtttatataactggtgatgtccaaatataaggtgttatgaattctccatatctgccatcggcattttaagctgcttctctattaggctggtcatcaaaagcaagttcagtgaaagccatcactgctgatatcacaacaagcaagatatctggaatataaatagactgcataaagtaatctgcaaaacagatcgttataagattgctgataaaatacagtataaaagcaaaaagtgcagtctttttcaatgaaagtgattttgccaaaatgatagagataatctttgtgagtgggtctatgattaaacctacagcaaagcaggctaaaataaataaagctaatgtttgattggaagcgtatgtgatgcccagtatggagaataagcctttcatcccgaagaaaaagccgccgaagatgactgcaagcgcaatggccgcgataaaagtgatagatacaattccgattaattttgatctgaggttaaaatctttagagtgctcgttctgttctttatggttcaagtatgacactcccttcacctgcttactcatacaaacagcacccttgaatcagcccaaaatatctataagtctgttttctgacgaaaatagtatagcatattttaacaaaaccaaaaaaggccctttccactggggaagggcctttttcatcatgttaactcctgagattcgccgaagctttctctttttttggccaaataaaatagctggctgtaatgagaaagtcaattcctataatgacagtccacagtttaagaatgccgctcaacgcctcggttcgggaagagtcattgataaaatagatcatccctgccaatagtcccgcaccaattaagtaggccagcacatgtcttagccagcctttcgcaccgtgtttggcatgatccattccaaaacgtttcagcggttttgcgcctttttttgtcacataatattgaaatttttcatctgcccattgaatcatttgtttcccataagcgatcgatataccgatgtaaacagctgcaatcccatgggctgcggtcgctgaggctccgcggtaaaggtccacaccagttgccgctaacaagatcaaatcgataactggagttaaggcaaggaatagcagtcctaatgtatgtcgtttgaatacgtagcgtacagcaagccccaaaacaatgacaacccaaaacgcaatttcacagaaaacaatcatccatgcgataccgttcaatccattcccctcttttcaatacagttgtattatttaaataatatgttaccatctttgtttttgtaacacaactgtattataaaaattgccctctcatttttttcttgttacaataaagctatgccaaaacaaattgaccatgagaaaagaagaaaacaaattgcagaagcaacgtggcgcgtcattttagaacgagggatggagggagcatcagccagaaatattgcaaaggaagcaggattgtcattaggtgcgctgcgccattatttctctacacaggatgaattgcttgcttttgcaatgaaacttgtccaagaaaaggtgacggaccgaattaaggacattgcagtgagggatttgctccctaaggaaaaagtgttgcaaattttgcttgaaatggtcccgacgaatgaagaaacgattagagagatggaggtttggtttgcttttactgcttacgccagacataaaaaggatatgtttgatgcgaatcatgacgggattttcagcggcatgcggaatctgattgcctatttagatgaatccgatttactgaagccgaatgctgataaagacattgaagctgagagactttacgcgcttgttgacggcttggctttacatgccatgcttgaccctgtgcgagtgaataaagaccgaatcaagcgggtcattatgcagcatgtagagtcaatttgcgtggaagatacacgtgagacacaaaaacgtcatccttaaggcactagtgcgaaaagcgattcttgttgggcatgcgtccaaaagagtcgcttttttatattcaaagaacaaggatctctgaaaaaaatggaaaacgatcatgctgtttggtaaagtggaatgaaagacggactgaggagtgaacactggtccatcgtttaagaactttacatgatagggatggtataaatgaatcttacttacaaagtgcatccaattaaaacaaggtatcagggctggacgaattattgctatatcattgaagatattgtaagcagatctgcaattgttgttgatccctcatgggaattgagtaagataaccactacactttctgaactcgaagcggaattaaaggcagtcgcattgacacactctcattatgatcatgtaaatctggtagacccgctgacgaagatgtttaacgctcaagtttatatgtcaaaaaaagaaattgattattatcaattccgatgcagaaatttaattagcctagatgatcatcagacaatcagcataggaaacacaagagcacaatgtcttctcacaccggggcatacagccggcggaatgtgttatttgttttctgagagtatttttaccggagatacggtgtttacagaagggtgcggcatatgtgaggatgatggcagctctgcggaagagatgtttgatagtattcaaagaataaagtcggaggtttcacctcatgtacgggtgtatcctggtcactcatttggcaaatcgcccggtcattcgataaaggatctttatcagcataatatttactttcaaattgataaaaaagaatattttgtgaaatttcgcactcgtaaaaaccaaaaaggtatttttgattttaaataatccttctgaatctattatcctatttttcttcgaatatctaaatgatttttattttcaaaaatgattacatagaaggtgttatttattttgaaaactcatttgaaagaaaatgaagcgcattatcatgatatggcgccctatacgtgatctgggtcttttttcttatgttctgttatatctcctgatcctttattcctcaatggaaaaaagcagaaaaacaatcgagcaaactgtaggaaaaattaacttgacggataatatttacagaggttaccatcaacatgaacatgctactatttatccggtcatcactattataaaatcatacagaagtgaaatacatctactaatcggaagggtggctttgagagaatgatcacatatgtttttccaggtcagggttcacaaaaacagggaatgggcagcggcctattcgatgaatttaaagaactgacggatcaggcagatgagatcttaggatattctatcaaacgtctttgcctggaaaatccttattccaatttaaacaaaacgcaatttactcagccggcattatatgtggtaaacgcactaagctatctgaaaaaaatcaaggatgaagaagttaaacctgactttgtcgccgggcacagcttgggtgaatacaatgcgttatttgcagctgaagcctttgattttgagacaggtttacagcttgtcagaaaaagaggcgagctgatgagtctgataagcaacggcggtatggcagctgttatgggactaaatgaagagcaggttgcaaaggctctgaaagaatatcatttacatgatgttgatatcgctaatgtgaatgccccatatcaaattgtaatttcaggaaaaaaagatgagattgaaaaagccgcatctctttttgaaacgatgactgaagttacaatggtactccccttaaacgtaagcggcgcgtttcattccagatacatgaataaggcaaaagaagaatttgaggagttccttcatgccttttatttttcgcctccgtctatcccagttatttctaatgtgtatgccaaaccgtatacatacgaattcatgaaacagacgctggctgatcaaattaatcattcagtgaaatggactgacagtataagctacttaatgaaaaaaggccatatggagtttgaggaggtagggcctggaaatgttttaactgggttaattcatcgcataaagaaagatgcggaagcaatgcccagctaaagcatttgcccctatggccgtgcacctcatcaatcaggtctaaacacagatttcctttcatttaaggtataaagttttaaagattcaatcgttcgattgacactgtttctaattgaataactttatatactgttacataaagaggctgataaattaagttagacatttgaactatgtcagccggtctgtcaaaccatcgctcccacatctagatggtccattttttaaccgcacccaccaatcatagagtcgatgttctttgctgatcctgttatcatgttacatcaattttgagatatcaacatacatctacgatcacgtcataaatgaaccgcatccagagcaccaatagcaatccttccaagttgaatctcctttactttttcacatatgtcttttccgtttattaatttcatttcaatcgctgctatgtgctttaacaacatgcatggaaatgagaaatccaatagccgtcataaatataaaaaaagaaggttatacacatgaatgaaccgcttgtttttatgttttccgggcaaggttcccaatactatcacatggggaaagaactatttaaggaaaataccgtgtttcgtcaatcaatgcttgaaatggatgccattgcagcacggcgaatcggcacatccattgttgaagaaatctaccatccaggtaaacgtgtgtcagatccgtttgacagtattcttttttcccaccccgccatttttatgattgagtattccttatataaggttttggaagacaggggaatttatcctgattacgtattgggatcaagtctgggagaattcgcagcagcggcagtttctggtgtgtcagacgcagaggatatactggattgcatacttgaacaggctattatcatccaaaattcctgcgataaaggaaaaatgatggccattctggacaaaccgcaattgctgaatgattatccgcaactgtttggaaatagtgaactcatttctatcaattatgattcgcacttcgtcatttctggtgaagaagatcatataaggaagattatggaggatttaaaggagaagcagattctttgccagctgcttcctgtgtcctatgcctttcattcttcgcttattgatccggcagagagtgcctatgcagaatttttaagatcaaaatcttttcaaaaaccgtcaataccgattgtatcgagcttaacgggaagctgccttcacgtaatggacgagaatttcttttggaatgcggtcagaaagccaatgatgtttcgtgaagcgattcgatatttggaaagccagcatacatgcaagtttatcgatttagggccatccggcaccttagctgcttttgtgaaacagctgattccgggtgatgcagctgaccgttgctgctcaatcataacaccatttcatcaggagctgaaaaatctgaatacggttgagtattaccgtacaccagaaaggaagtttacaagatgattacatatgtctttccagggcaaggctcccagcaaaaggggatgggacaagggctatttgaacagtatcagcatttgacagatcaagcagatcaaatattgggctattcaatagagaagctatgtaccgaaaaatcatatctggatgtaaatcatactgaatacacgcagccggctttgtatgttgttaatgcactcaattacttgaagagagtggaggagaccggcagaaaacctgattttgcggcaggacatagcttaggagaatacaatgcgctgatggcagccggtgcctttgattttgaaaccggattaaggctcgtcaaaaaaagaggagaattgatgggacgaattacagggggcggaatggctgctgtgatcggcctgagtaaggaacaagttacagccgttttagaagagcaccgtcttcatgacattgatgtggcaaatgaaaatacgccccggcaaattgtgatttctggcccgaaaaaagagattgaaaaagctcgggctgtttttgaaagcaccaaggatgtaaagctgtttcatccattaaatgtgagcggagcttttcattccagatatatgaatgaagccaaacaggtatttaagcaatatattgactcattccagtttgcacctttggcgatcccggttatctccaatgtctacgcagagccataccatcaagacagattaaaagatacattatctgaacagatggacaacacagtgaaatggacggacagcattcgtttcctgatgggaagaggagaaatggagtttgaagagattgggcctggaactgttttaaccggtctcattcatcggattaaaaatgaagctgaaccattgacatatataccgaaaaagaaccccgcgatcagtgcgcatctaaaggagaaacgcaatgttcaagctgggattacggcagaatctttaggaagtgctgaatttaaacaagattatcatcttacatatgcttatcttgcaggaggaatgtaccgcggcattgcttcgaaagaaatggtagtaaagctgtcaagagcgggaatgatggggttctttggcacaggaggtctgagcctgaaagaggttgaagatgcgatccatgctatacaaggtgaattagggaaaggacaagcctatggcatcaatctggtccacaatatgaaacatactgaatcagaagaaaaaatgatcgatcttttattgaggaatcaagtgagcattgtggaggcttcagcatttctaagtgtcactcctgcattagtaaggtaccgcgcaaaaggagtgaaacgaaatcaaaatggtgacgttatatgctcaaatcgtctcatagcaaaaatatcacggccggaagttgcagaatcatttctgagtcctgcgcctgagaatatgctgcaaaagcttttaggagaaaataaaatcactatgaacgaagctgagttgttgcggtgcattccgatggctgacgatatttgtgtagaagctgattcaggcggtcatacagatggcggtgtggcatacagcctgatgccggcgatgacatctttaagagatgaaataatgaaaaaatatcaatttcggaaaaaaataagagttggtgcagctggagggattggaacacctgaggcagcgatggcggcttttatgctaggggctgattttattctaacaggctcaatcaatcaatgtacggttgaggcggcaacaagtgataaagtaaaggatttgcttcagcagatgaatgtacaagatacagcctatgcgcctgcaggtgatatgtttgaatcgggcagtaaagtgcaggtgctaaagaaaggcgtgttctttcccgcacgggcaaacaagttatatgaactgtaccagcggtatgggtctatacgtgagctggatgcaaagatgctggcccagcttgaggagaaatactttaaacgcagtatagaagacatatataaagatattgcattgcattatcccgcggcagacattgagaaggctgaacaaaacccgaagcataaaatggctttgattttccgatggtacttcagatacagctcaaaattggcaatcagcggaagcgaacattcgaaggtcgattatcaaattcactgcggtcccgcgctgggagcctttaatcaatgggttaaaggatcgcaattagaaaattggcgaaaccgccatgtggatgaaattgggaaaaaaataatgacagaaacggcagtattgcttcatgaacggatgcaatcgatgtatcagccgtcgcatgaaacagacaacataaaaatgaaagtttgaatattatgaaaaaatacctataaaaatcattaaaataatccctcgaaggagagagcgtattatggataaacagagaatctttgaagtactaatcaccaatatttgcgaggtgcttcctgaattagacggacacagatttgagcctgaagatcagctagttgagctaggagctgactctgtagacagagctgaaattatcacgatggtgctagaggatttatcgctaaaaattcctcgcattgagctatccggggtgaaaaacatcggtgaattagctgaggtgctttatgacaaagtgcaatctgcctgaggtggtggtgaccggtgtaggcgttacggcctccatcggtcaagggaaagaggactttgcttcctcgctgctgtccggcagacatgcctttgatgtcatgaagcgttcaggcagacaaaaagacagccggtttatcggagccgaaattgcgtcattgtcttatcctgaccgactctccaaaaaaatgttgcgaaaagcatcattctccagccgcgctgcattggtaactctcacagaggcttgggaggaggctgaattggacgatgcagattcctcacgtatcgggctggttgttggcgggtcaaattttcaacagagagaaaactttgaagtttatgaaaggtatcaagaccgctccggttttatttctccggcgtatggcctgtctttcatggacagcgatctttgcgggatatgtacagatcagtttggcatcacgggattagcatatacggtgggaggagcctcggccagcggccagttagcagtcattcatgcgattcagcaagtcctgtcaggcgaagttgatacttgcattgcacttggtgctttaatggatctttcttatatggaatgcgaggcgctaagggctttaggcgctatggggacggacaaatatgctgatgaacctgaaaaagcgtgccgtcccttcgatcaaaacagagacgggtttatctatggagaatcgtgcggtgcattggtaatagaacgaaaggagacggctttacgaagaggtcttaaaccttatgcagcattgtctggctggtcaatcaaactggacggaaaccggaatcctgatccttcattagaaggagagattcatgtcatccagcaggcactggagcgtgccaggcttttaccagaagatattgattatattaatcctcatggaacaggctcttttattggagatgaaatagaattaaaggcgctccgtgcatgccggctttcccatgcttatatcaatgcaacaaaatcgataaccggacacgggcttagtgcggcgggcatcgtagagattatttctgttttgctgcaaatgaaaaaatctgccctgcatccgagcaggaatttggatcatccaatcgatgattcctttcattgggtaaatgagaaatcgatttcataccgcatcaaaaatgcgctgagtttaagcatggggtttggcggaatgaacaccgcggtttgtatacaaaacattgagaaatgtggaggcgaatcataaatggtttcagccggaatagaagcgatgaatgtctttggcggaacggcataccttgatgtcatggagctggccaaatacagacacttagatactgcgagatttgaaaacttattaatgaaagaaaaagcggtagcactgccttatgaagatcccgtgaccttcggagtcaatgcagctaagccgattattgatgctttatctgaagcagagaaggaccggattgaattgctgatcacttgctctgaatccgggatcgactttgggaaatcgttaagtacatatatccatgaatatttaggtctcaaccgcaactgccgtttgtttgaggttaaacaggcgtgttattcagggacagcgggatttcagatggcggtgaattttatattatcccaaacttctccgggtgccaaagcactggttatcgccagtgatatttcacgttttttaatcgctgagggcggagacgctttaagcgaagattggtcttatgcggaaccgagcgccggagcgggagcggtggccgttttagttggcgaaaatcccgaggtgtttcaaatagatcccggagcaaatggttattacggctatgaagtgatggacacgtgccgccccattcccgacagtgaagcgggagattctgatctgtctttaatgtcatatttggattgctgcgaacagacctttctggaatatcaaaagcgtgtaccgggtgccaattatcaggacacgtttcaatatcttgcttaccatacgccctttggcgggatggtgaaaggtgcgcaccggacaatgatgcgtaaggtggcgaaggtgaaaacatccgggattgagacggattttttaactcgggtaaaaccaggtttaaactactgtcaacgagttggaaatattatgggggcagccttgtttctggcattggccagcacgatagaccaagggagatttgatacgcctaaacgaattggctgtttttcctacggatccggctgctgttctgaattttacagcggaattacaactccgcaaggccaggagcgtcagcgaacatttggtattgagaagcatttggatcgccggtatcagctctccatggaagagtatgagctattgtttaaggggagcgggatggtgcggtttgggacgcgcaatgtaaagctggactttgagatgataccgggcatcatgcagtccactcaagagaagccgcgcttgtttttagaagaaatttctgagtttcatcggaagtacaggtggatctcgtgacctatcaaacgataaaggtccgctttcaagcgtcggtttgctatattacctttcaccgtcctgaagcgaataatacgattaatgatacgctgatagaagaatgcttgcaagtgttaaaccaatgtgaaacatcaacggtgacggttgtcgttttagaggggcttcccgaggtgttttgtttcggagcggattttcaagaaatctatcaggaaatgaaaaggggcagaaaacaggcaagctcccaagagcctctctatgatttgtggatgaaattgcagaccggcccttatgtcacgatttcgcatgtcaggggaaaagtgaatgccggcggtcttggatttgtatctgccacagatattgccattgctgatcagacggcgtcattcagtctctctgagctgctattcggcctgtaccctgcttgtgttttaccgtttctgatccgccgtatcggccggcagaaagcgcattatatgacgcttatgacaaagccgatttccgttcaggaagccagtgaatgggggttaatagatgcttttgatgctgaaagtgacgtgctgctgagaaagcatttattgcgtttgcggaggctgaataaaaaaggaatcgcacattataaacagtttgtgagctcacttgatcatcaagtcagtcgtgcgaaagccaccgctttaactgcaaatcaagacatgttttctgatcctcaaaaccaaatgggaatcatcaggtatgttgaaacaggacaattcccatgggaggatcagtaaccgtttaaaaatgacaatcagaaccgttaggaggacatcatgacgcattctgttgtagagcttatcgaaattgaatccgccattattcaggtaaagatgcaagatcgcactcataaaaacgcgttttcacaagaacttacagacggtttaattcaagcgtttgaatacatacggcagaaccccaaatacaaagcggtcattttgacaggatatgataattattttgcttcaggaggaacgcaagaaggactgcttcgaattcaacagggattgaccaagttcactgatgacaatctttattctctggcgctggattgtgagattccagttattgcggcaatgcagggccatggaattggaggcggctttgtcatggggctctttgctgacatagtcattctgagcagagaaagcgtgtatacggctaattttatgaaatacggatttacgcctggaatgggcgctacctttatcgttcctaaaaaactgggtttcagcctgtcccaggaaatattattgaatgcgggcagctaccgcggagctgatcttgaaaaaagaggggttccttttaaggtgctgccccgtgcagaagtgttagattatgcagtggagctggcgcaagaactggcggaaaagccgagaaactcactggttacactgaaagatcatttggttgccccgcttcgcgatcagctgccgcgcgtcattgaacaggaattgatgatgcatgagaaaacatttcatcatgaagaagtcaaaagtagaatcaaaggtttatatggtaattaactgaaaatatataaaattttgcaggtgaaatggaggcagcgtgatgagaaataatgataatatccgcattttagctaatccttctgtcagtcatggtgagcctttacatatatctgaaaagcagccggcaacaatacctgaagttttatacagaacggcggcggagcttggggatacaaagggaatcatttatttgcagccggatggaactgaagtttaccaatcatacagacgattatgggatgatggactgcgcattgcaaaagggcttcgccaatcaggcctgaaagcaaaacaaaacgtgattttgcagcttggtgacaattcacagcttctccctgcgttctgggggtgtgtgttaacaggggttgttccggctccattagccgttccgccaacgtatgctgaatcgagcagcggcactcaaaagctgaaagacgcatggacgcttcttgataagccagcggtgattacggaccgggggatgcatcaggaaatgctcgattgggcaaaagaacaagggcttgaagggttcagggcaattattgtagaggatctgctcagcgctgaagcggacacagattggcatcaatccagtcctgaagacttagcgcttttattgctgacttcaggcagtacgggaacgcccaaagcagttatgcttaatcatcgtaacattatgagcatggtgaaagggattattcaaatgcaaggcttcaccagagaggatattacgtttaactggatgccgtttgaccatgtcggagggatcggaatgctgcatttgcgggatgtttatcttggctgtcaggaaattaacgtctcaagcgaaacgatcttaatggagccgttgaaatggctggattggattgatcattaccgagcttctgttacgtgggcgccgaattttgcgtttggtctggttactgattttgcagaagaaataaaagataggaaatgggatctgtcttcaatgcgatacatgctcaatggcggtgaagcaatggtagccaaggtagggcgcagaatacttgagcttttagaaccacatggactgcctgctgacgccatccgacctgcctggggaatgtccgaaacttcatcgggcgttattttttctcatgaatttacccgggctggaacaagtgatgatgatcattttgttgaaataggctctccaatccccggcttctctatgagaattgtgaatgaccataatgaattggttgaagagggtgagatcggccgttttcaagtctcgggtctttctgttactagcggttattaccagcggcctgatttgaatgagagtgtgtttacagaagacggctggtttgaaaccggagatcttggctttttgcgaaacgggcgcttaaccataacaggccgtacgaaagatgcaattatcattaacggcattaattattacagtcatgcaattgagtctgcagttgaagaattatctgaaattgaaacttcttatactgctgcttgcgctgtccgtctgggccagaattcaacagatcagctggctatcttctttgttacttccgcaaaattaaatgatgagcagatgtctcagcttcttagaaacatacaatcccatgtctcacaggtgatcggagtcaccccggaatatttgctgcctgtacaaaaagaagagattccaaaaacggctatcggaaagatccagcgcacccagctaaaaacttcatttgaaaatggagagttcgaccacttgctacataaacccaatcggatgaacgatgcggtccaggatgaggagatacagcaagcagaccatgtgaaaagagtaagggaagaaatacagaagcatctgctcacctgtttgactgaggagctgcatgtttcccgcgattgggtggagccaaatgcaaatatccaaagtcttggtgtgaattctatcaagatgatgaagctcattcgatcgatcgagaaaaactaccatatcaaactaacagccagagagatacatcaatatcctacaattgaacgcttagccagctatctatcagaacatgatgacctcagcagtttgtctgctgacaaaaagggcacggacacatataaaaccgaaccggaaaggagtcaggcaacttttcagcctctctctgaggttcaaaaaggattatggacattgcaaaaaatgtcacccgaaaaaagtgcatatcacgtacctctctgttttaaattttcgtcagggcttcaccatgaaacattccagcaggcttttggccttgtattgaatcagtacccaatcttaaagcacgtcatccaagagaaagatggagtgccatttcttaaaaatgagccggcactttcaattgaaatcaagacagaaaatatctcaagtttgaaagagtctgatattcctgcttttcttagaaagaaagtaaaggaaccgtatgtaaaggaaaacagcccgttagtgcgtgtcatgagcttttccagatctgaacaagagcattttttattagttgtcattcaccatttgatttttgacggagtttcgtctgtcacatttatacgcagtctgtttgatacctatcagcttcttttaaaaggacagcagccggaaaaagctgtttctcctgccatttatcatgattttgcggcatgggagaaaaacatgcttgccggcaaagacggtgtgaagcaccgtacatactggcagaaacagctatcgggaactttgccgaatcttcagctgcctaatgtcagcgcaagttcagtcgattctcagtttagagaggatacatacagcaggcggctgtccagcggcttcatgaatcaggtcagaacgtttgcgaaagagcattctgtaaatgtcacgacggtattcttaagctgctatatgatgctgcttggccgttacaccggccaaaaggaacagatcgtcggcatgccggccatggtgaggccggaagaaagatttgatgatgccattggacattttctcaatatgctcccgattcggagtgagctgaacccggcagacactttttctagctttatttcaaaattgcaattaacgatattagatgggcttgatcatgcagcatatccttttccaaaaatggtgagggatctgaatattcctcgcagtcaagcaggttcaccggtatttcaaaccgcttttttctatcagaattttcttcaatccggaagctatcaaagcttgctgagccgctatgctgacttcttttctgtcgatttcgttgagtatattcaccaagagggcgaatacgaattagtatttgaactgtgggaaacagaagaaaaaatggagctgaacatcaagtacaatactgggctgtttgatgcggcttctatatccgccatgttcgaccattttgtttatgtaacagagcaggcgatgttgaatccatctcagcctttaaaagagtattctttattacctgaggcagagaagcagatgattctcaaaacatggaacgccacaggaaaaacgtatccatatataacttttcatgagttgtttgagcagcaggcgaaaaagacgcctgatagagcggctgtcagctatgaaggtcaaacattgacgtatcgggagcttgatgagaaaagcacacagctggccatttatttgcaggcgcatggagtgggtcctgaccgtctggcggggatctatgtggatcgatcgctggacatgctagtgggtttattagcgatcctcaaggctgggggagcgtatgtgccgctagacccgtcctatccggctgaacgattagaatacatgcttgaggacagtgaagttttcattacactgacgacatcggaattagtaaatacgttgagttggaacggtgtcacaacagctcttttagatcaagattgggatgaaattgctcaaacagcctctgatcgaaaagtgcttacacgcactgtcacgccggagaacttggcatatgtcatttatacatccggcagcacaggaaagccaaaaggtgtcatgataccgcataaagctttgacaaactttctcgtttcgatgggggaaacaccaggtcttacggcagaggataaaatgcttgctgtcacaacctactgttttgatattgcagctctggaattatttttgcctttaataaagggcgcacactgctatatttgtcaaacggagcatacaaaagacgttgaaaaactgaaacgggacatccgcgcgatcaaaccgacagtgatgcaggcaacccccgctacgtggaagatgctcttttattcaggctgggaaaatgaagagagcgtgaaaattttatgcggtggcgaagcatttcctgagacattaaaacgatatttcttagatacgggcagtgaagcctggaatatgttcgggccaaccgaaacaactatctggtcagcggttcagcgcattagcgatgaatgctctcatgccacgataggaaggccaatcgccaatacacaaatctatattacggattctcagctcgcgccagtgccggcaggtgtcccgggtgagctgtgcattgcaggagacggtgtggcgaagggctactacaaaaaggaagaattaacggattcgagattcattgacaacccttttgagcctgggtctaagctttatagaacgggagacatggcccgctggcttccgggagggcgaattgaatatataggccgcatcgataatcaagtaaaaatccgcggattccgtattgaacttggtgatattgaaagcaggcttagtgagcatcccggcattctggaatgcgttgtggtcgcagatatggataacctagctgcctattatacagctaaacatgcaaatgcttctctcacagcgagagagctgcgtcattttgtgaaaaacgctttgcctgcctatatggtgccttcttattttattcagcttgatcatatgccgttaactccgaacggaaagatagatagaaacagccttaagaatatcgatttatcaggggagcagctaaagcaaaggcagacctctcctaagaacattcaggatactgtttttaccatttggcaggaagtgctgaaaacgagtgacattgaatgggatgacggatttttcgatgtgggcggggattcgcttctcgcggtcactgtggctgatcgcatcaaacatgaactatcctgtgagttttctgtcacagacctgtttgagtattcaaccattaaaaatatcagccagtacatcactgaacagcgaatgggcgatgcaagtgaccatatgccgacagacccggcagctcatatagaagatcagtctaccgagatgagtgatctcccagactattatgacgatagtgtagcgattattggcatatcgtgtgaatttccaggggcaaaaaatcatgatgaattttgggagaacctcagagacggcaaggaaagcatagcgtttttcaataaagaagagcttcagcgctttggcatttcaaaggagatagcggagaatgccgactatgtcccggctaaagcttcaattgaggggaaagacagatttgatccaagcttctttcaaatctctcctaaagacgctgaatttatggaccctcagcttcggatgctgctgactcattcatggaaagcaatagaagatgccggttatgctgcgagacagattccgcaaaccagtgtttttatgtcggcaagcaataattcttatcgcgcgctgctgccgtcagatacaacagagagcctagagacgccggacggctatgtttcgtgggtgcttgcacagagtgggacgatcccgacaatgatttctcataagctcgggctgagagggccaagctatttcgttcatgccaactgctcatcatctctgattggattgcattctgcctataaaagcctcctgtcgggtgaatctgattatgctttagttggcggtgcaacgctgcataccgagtcaaatatcggatatgtgcatcagcctgggctgaacttttcgagtgatggacatattaaagcttttgacgcttcagctgacggaatgataggcggtgagggcgttgctgttgtattgctgaaaaaagcagctgatgctgtaaaggacggggatcatatctatgccttgctgagaggcattggtgtaaataacgacggcgctgacaaagtcggcttttatgctccaagcgttaaaggccaggctgacgtggtccaacaggtcatgaatcaaacgaagatacagcctgaatccatctgctatgtagaagcacacgggaccggaacgaagctgggggacccgatcgagctggcggctttaacaaacgtttacaggcaatatacaaataaaacgcaattttgcggcattgggtcggtgaaaaccaatatcggacatttagatacagccgccggtcttgcgggctgcattaaggttgtgatgagtctttatcatcaagagcttgcaccgagtatcaattataaggagccgaatccaaatacagacttagccagctctcctttttacgtcgtcgatcaaaagaaaacgttaagccgtgagatcaaaacgcacagggctgcacttagctcgttcgggcttggcgggacaaatacccatgccatttttgaacaattcaaaagggattcagataagggaaagatagacggaacctgcatcgtcccgatctcggcgaaaaataaagagaggctgcaagagtatgcagaagacattctggcctatttagaaagaagagggcttgagaacagccagctgcctgattttgcgtatacccttcaggtggggcgcgaagcgatggagcatcgcgttgtctttattgccgatcatgtaaatgagttaaaacagaggctcacagattttatcaatggtaaaacagcgattgaaggctgttttcaaggaagtaagcacaatgcaagagaggtttcatggctgacggaggatgaggacagcgctgaactcatacgtaagtggatggccaaaggaaaagtaaacaagcttgcagaaatgtggagcaagggagcgaatatagattggatgcagctttacaagggtgagcgcccaaacagaatgagtctgccgacttatccatttgcaaaggaacgatactggccgtcgcaggatgaccgcaaaccggtggcgcagatatccggaaatcagacagggatcggctctattcatccattgcttcatcagaatacatctgatttttctgaacagaaattcagttcggttttcactggtgacgaatttttcctgagagaccatgtggtaagaggaaagcctgtgcttcctggtgttgcgtaccttgaaatggcgtacgcggctataaaccaggcggcaggaagtgaaattggccaagatgtcagaatcagattgaatcatacagtctgggttcagcctgttgtggttgacagacattcagctcaagtggatatcagtctcttccctgaagaagatggaaaaatcacctttgacatttacagtacacaggaagacggggacgaccctgttattcatagtcaaggcagtgcggagctggcatctgccgccgaaacgccagtcgcagacctcactgaaatgtcacgccgctgcggcaaaggaaagatgtcgcctgatcaattttacgaagaaggcagaagcagaggaatgttccatggtccggcctttcaaggaattaagaatgtgaatataggaaacagagaggttttggcgcagctgcagcttccggaaatcgtttctggaacgaatgaacagtttgtgctgcacccaagtatcatggactccgccttgcagacagcaacaatatgcatcatgcaggaattgacggatcaaaagctgattttgccatttgcgcttgaggagcttgaggtgatcaaagggtgttcttcttctatgtgggcttatgctcgcttaagtgacagcgatcactccggaggggttgttcagaaagcggatatcgatgtcattgacgagagtggaagcgtatgtgtcaggatcaaaggattctcaacgagagtattagaaggggaggttcatacttcaaagccttcaacacggtacgaacgcttaatgcttgaaccggtgtgggaaaaacagaatgaagaacgagaggacgaagatccttcgtacacggagcatatcattgttctcttcgaaactgaacgaagtgtcacagacagcattgcctcccacatgaaagatgtccgtgtgattactctaaacgaagctgaaggacatattgctgaacgttatcaatgttacatgcagaacatttttgaactcctgcaaagcaaggtccgtgaactttctgcaggccgtatcatcattcaagcgattgttccgctggaaaaagagaagcaattgtttgccggcgtttccggtctgtttaaaacagcagaaatagagttcagcaaactgactgctcaggtcatcgaaattgagaaacctgaagagatgatagaccttcacctcaagctgaaagacgacagccagagaccatttgacaaacagattcgatatgaggctggacaccgttttgtgaaaggctggagggaaatggtgcttccttcagctgatatgcttcacatgccgtggagagacgaaggcgtttatctaatcacaggcggagcaggaagcttaggccttctgtttgcaaaggaaattgccaatcgaactggccggtctactattgtgctgacgggacgatctgttttaagtgaggataaggaaaacgagctggaggctcttcgaagcatcggagcggaggttgtctatcgggaggctgatgtaagtgatcagcatgcggttcgtcatcttttggaggaaatcaaagaaagatatggcactctcaatggaattattcacggtgcaggcagcattaaagatcgcttcatcattcataaaacgaatgaagagtttcaagaagtgttgcagccaaaagtgagcgggttgttacatgtagacgaatgcagcaaggatttcccattggactttttcattttcttctcttctctttcgggatgtttaggaaacgctggacaagccgattatgcggcagccaattcgtttatggatgcatttgctgaataccgccgttctcttgcggcatcaaaaaagagattcggctccaccatttccttcaattggccgttatgggaagaaggcggtatgcaagtcggcgctgaagatgaaaagagaatgctgaaaacgacgggaatggtcccgatgccgacagatagtggcttgaaagcattttatcaagggatagtatctgataagccgcaagtttttgtgatggaaggacagcttcagaaaatgaagcaaaaactgctttccgcaggatcgaaagccaagcggaacgatcagagaaaggcggatcaggatcaaggacaaactagaaaattggaagcagccttaatccaaatgattggcgcaattttgaaagtaaacactgacgatatcgatgtcaacacagagctgagtgagtacggattcgactcagttacattcactgtctttacaaacaagatcaacgaaaaatttcagttggagctaacaccgaccattttctttgaatatggtagcgtccaaagcctggctgaatatgtagttgctgcgtatcagggcgaatggaatcaagatgctactgctaaaggcaaagatgaaagaacaaacttagtgcacagtttaagcagcctggaggcatcattaagcaacatggtcagtgcaattttaaaagtaaatagtgaagatattgatgtcaatacagagctgagtgaatacggatttgattccgttacatttacggtctttacaaacaagattaacgaagaatttcagttggagctaacgccgaccattttctttgaatatggaagtatccaaagcctggctgagtatttgactgctgaacatgaggacaccctggttcaggagcgcgaaaaaccagaggggcaggaagagttacagacaaaatcccctgaagcgccgaaaatcacatcacgtagaaagcgccgctttacacagcctgttattgcaaaagcagaaagaaacaaaaagcaggctgccgattttgagccggttgcaatagtcggcatcagcggccgattccctggcgctatggatatagatgaattttgggaaaacctagaagaagggaaagacagcatcacagaagttccaaaagatcgatgggattggcgggagcattatggaaacccagacactgacgtcaataaaaccgacatcaaatggggcggatttattgacggtgtcgctgagtttgatccgttgttttttggtatttcgccgcgagaagctgattatgtagaccctcagcagcgcttgttaatgacatacgtgtggaaggcactggaagatgcgggttgctcgccgcaaagcctttcgggtacagggaccggtatctttatcggtacgggaaacaccggttataaagatctattccatagagcgaatcttccaattgaaggccatgctgctacaggtcatatgattccttcggtaggcccgaatagaatgagttattttttaaatattcatggtccgagcgaaccagtagagacggcctgttccagttctcttgtagccattcaccgtgctgtgactgcgatgcaaaacggtgattgtgagatggcgatcgctggaggcgtgaatacgatcttaaccgaggaggcgcatattagctacagcaaggcgggtatgctcagcaaagacggcaggtgtaaaaccttctccgccgatgcgaatggctatgccagaggcgaaggggtcggaatggtcatgttgaaaaagctggaagatgccgagcgcgacggaaatcatatttatggcgttattcggggcacggcggaaaatcacggcggaagagccaataccctgacatcgcctaatccgaaagcacaagctgatttgttggtgcgtgcatatcgccaagcaggcatagatccaagcactgtcacatatatcgaagcacatggaacagggacggaattgggcgatccgattgaaataaatgggctgaaagccgcgtttaaggaactatccaatatgaaaggcgagagccagccggatgttccggatcaccgttgcggcatcggctcagttaaaagcaatatcggtcatttagagctagcagccggtatttccggtttgatcaaagtgcttttgcaaatgaagcataaaacgttagtgaaaagcctgcattgcgagacgcttaatccttatcttcagctgacagacagtccgttttacatcgttcaggaaaaacaggaatggaagtctgtcacagatcgtgacggaaacgagcttccgcgccgtgccggaatcagttcgtttgggattggcggagtaaacgcgcatattgtggttgaagaatatatgccaaaagccaattcagaacacacggctacaggacagccaaacgtgattgtgctgtcggctaaaaataaaagcaggctgatagatcgtgctttgcaattgcttgaggcgatccgcaataaaaaatatacagatcaggagttgcaccgcatcgcttacaccctgcaggtcgggcgcgaagaaatggatgagcgtctggcgtgtgttgcggggacaatgcaggaacttgaagagaaactgcaggcgtttgttgacggtaaggaagaaacaggcgaatttttccggggacagtctcatcgaaataaagagacccagactatatttacagcagatgaagatatagcgttggcacttgatgcttggatcagaaaaagaaaatacgccaaacttgctgatttatgggtcaaaggggtctcaatccagtggaacacattatacggagagaccaaaccgcgcctgatcagcctcccttcatatccgtttgcgaaggatcactattgggtgccgacaaaggaacattcagaaagagacaaaaaagaactggttaatgcgattgaagatcgggctgcatgctttttgacgaaacaatggagtttgagtccaattggctcagcagtgccggggacaagaactgttgccatcctgagcaatcaagagacagcagatttagcagcagaagtgtcttcgtattttccgaatcatctcttattagatgtgagccggatagaaaatgatcagtcagacattgattggaaagagtttgacggcctagtggatgtcatcggatgcggtaaggatgatgagggccggctggattggattgaatgggtgcaaagactggttgaattcgggcataaagaggggctcaggctgctttgtgtgacgaaggggctcgaatcgtttcaaaacacatctatccggatggctggcgcctcacgggctgggttgtatcgaatgctccaatgcgagtacagccatcttatatcaaggcatatggatgcagaggaggttactgatcatcgccgtctcgcgaagttgatcgctgatgagttttattccgattcttatgatgcggaggtttgctacagggatggtttacggtatcaagcttttctaaaagctcatccggaaacaggtaaggccacggaacagagcgcggtcttcccgaaagatcatgtgcttctcattacaggcggcacacgaggcatcggactattatgcgcccgtcattttgcagagtgctatggagtgaaaaaactggtgctgaccggacgagaacagtttcctccgcgagaggaatggactcgttttgacacctcgaacacatcagttgcccagaaaatccaggcagtgcgggagctggaagcgaagggtgtacaggtggagatgctgccgctgacgttatctgatgatgctcaggttgagcaaacgttgcaacatatcaagcgaacattaggaccgattggcggtgtcattcattgtgcaggtctgacggatatggatacgctggcatttatccgaaaaacttcagatgatattcagcgggtgctggaacctaaggtgtcaggtcttacaacgttatatcgccatgtgtgtaacgagcctttacagttttttgtcttattttcttctgtttcagccattattccggagctttcggcgggacaagctgactatgctatggccaatagctatatggattattttgcagaagcacatcagaaacatgcgccgatcatcagtgttcagtggccgaactggaaagaaaccggtatgggtgaagtgacaaatcaagcgtatcgggaaagcggcttgttgagcattacgaattcagaaggcttacgttttctagatcaaattttatcgaaaatgttcggaccggttgttctccctgcgatggcgaatcaaacaaactgggagccggaactgctgatgaagaggaggaaaccgcatgagggcggtttgcaggaagctgctttacagagcccgccagctagagacattgaagaggccgatgaagtttccaaatgtgatgggttattatctgaaacacagtcctggcttgttgatctgtttaccgaagagctgagaatagatcgtgaagacttcgagattgacggggtgtttcaggattatggcgtggattcgatcattttggcacaagtgctccagcgtataaaccgcaaattagaagcagcactcgatccatcgattctatatgaatacccgacaattcaaaggttcgcagattggctgatcggttcttattccgaaaggctgtccgctttattcggaggcaggatatcggatgcatcagcacctttggagaacataatattggcggaggcagctgttcctgcggaggatcgagctcttacacctcagattcaggcgccagcgattttgtcaccggactctcatgcagaaggtattgccgttgtcggactctcttgccgattccctggggcagatacattggagtcatattggtcgttactatccgaggggcgttcgtcaatcggcccgattccggcagagcgttggggctgtaagacgccatattatgccggcgtgattgatgacgtcagctattttgatcctgatttctttttgcttcatgaagaagacgtaagggcgatggatccgcaagcactgctcgtattggaagagtgtctgaaactcttgtatcacgccggttatacgcctgaggaaataaagggaaagcctgtcggtgtttatatcggaggcagaagccagcacgaacctgatgaagagagccttgatcatgccaagaatccgatcgtgacagtcggccaaaattatttagcggctaatctttcacaattttttgatgtccgcggcccgagtgttgtagttgacaccgcatgctcgtcagctttggtcggcatgaatatggccattcaggcgctgcgtggcggagatattcaatccgccatagtcggcggtgtcagcttgctgagctcagatgcctctcacaggctgtttgaccggcgcggcattttaagcaagcattcatccttccatgtgtttgatgagcgtgctgacggagttgtgttaggtgaaggcgtcggaatggtcatgctaaaaacggtaaaacaggcgctggaagacggagataccatatatgctgttgtgaaagcggcctcggtcaataatgacggaagaacggcggggcctgcaacacctaatctggaggcgcaaaaggaagtcatgaaagatgcgctttccaaaagcggaaaaaaaccagaggacatcagctatcttgaggcaaacgggtcaggttcaatcgtaaccgatctccttgagctaaaagcgatccaatcagtgtaccgttctgggcactcatcgcctctttctcttggctcaatcaagccgaacatcgggcatccgctatgtgctgaagggatcgccagcttcattaaggttgtgctgatgctgaaagagcgccgctttgtcccatttttatcaggtgaaaaagagatggcgcatttcgatcaacagaaagcgaacatcacgttcagccgagccctggaaaaatggacagattcgcagcctactgcggctattaactgctttgccgatggggggacgaatgcccatgtcatcgtagaggcgtgggaaaaagatgaaaaacacgccatcaagcgcagtccaatatcgcctcctcaattaaagaaacgaatgctttcgccaggcgagacaaagctggaagcggagacttcgaaaatgactgcggcaaacatatgggatacttatgaggtggaggtctaacgtgaaaaagataacgaaacaactcacattatcgttaaaaaatccgtttatttatcaccatgtggtttacggacaaaatgtcctgccgggattggcttatatcgatataatctaccagatattcagagaacacggcttctcctgctcagagcttcagctgcggaatttatccatctatcagccattgacggcggaacaggatgcagtaattgttctgaatatccaatgcgcggagaaaaaagaaggacagtggcaaatcacagccaagggaactgaaaaacgtgatgggaaagaagcttcagaagaaaagctctatatgaaggctgatatgtacgcagactccccagccatatttgaagaaacactggatctcagtcaaatcaaagcatctgcacagaacgttgttcagcttgatgatgtatatgaacaatgcagacgtcaggaattggtgcacagcgaatatatgaaagcaaaaggctgcatctatgaagaggaagatggcgtccttcttgagctttctctcggttcggaagccatgcttcacgcagaaggctttatgtttcacccgactctcatagacgggagcggggtgggtgccaatcatttgctcacatctttgcttaaaggagaacagaggctgtatttgcctctgttctatgaatccttttccgcttctgcacttttgcagtcgaattgcatgacgagaattaagcgctcctccgtccggcgggaaaaagagctgatttatgtaacacttgaattttttaatgcgtcgggagaaaaagtggctgagttgaaaaactttacaagcaaattggtgcgagaagcggagctgattagcggaaaacatcaagatgcacaggagacacagatgacaagagcggacactgctgagcgtgataaacctgctgacatggtatcttctcccgttaattcctatagtgaggctgaacagttcgtaagccaattaatcgcagagaaaatcaataagccggtagaacaagttgaaaaacaggtcggttattaccaaatgggactgaattcatcgggcttgcttgaggtggtagaaacgatcagtgataagatcggtgagagcctttcgccgactcttctgtttgagcataccaccatagcggaactgtcagcgtttcttgccgaggaatatgctgagcattttagtgccgctggttcccttggccttggccagaatgaaagagcacgcgtttccgacagcataaacgaccgtaagactgttgaagcttctcgtcctgcacctattgaggcagcaggcgatattgcgattatcggcttggcgggcaggtatccgaaggcagccaatattcatgaattttggaacaatctgaaagaggggaaggactgcgttagcgagattcctgagtcgcgctgggattggcagaaacttgaaggaatcacatctccttcgggtaaggacatttccaaatggggaggatttattgatgatcccgactgctttgatccccaatttttcagaatcacgccaagagaagcggagacaatggaccctcaagagcggctgtttttagaaacatgctgggaaacgattgaggatgcgggctatacgccaaagacgttggccaagcctaaaggacgaaataaaaggcagcatgtaggagtttttgccggtgtcatgcacaaggattatacattagtcggagctgaagaagcatcagcagaaaatgtgtttcctctttcgctcaactatgcgcaaatcgccaaccgtgtttcttacttttgtaatttccacggtccaagtatggctgtcgatacggtatgttcatcctctttgaccgcagtgcacttggcgttggaaagcatacgtcacggtgagtgcgatgttgcgttagcaggcggagtgaacctgtctttgcacccgaataaatatatgacatacggggtctgggatatgttttccactgacggacactgccgtacgtttggaaaggatggagacggttatgtgcctgcagagggtataggcgcggttttattaaagcctttgcgccaggcagaggaagacggagatcgcatttatgcagttattaaaggaagtgctgtgaatcatgtgggcactgtaagcggcatttcagtgccgagccctgtttcccaagctgatctgattgagacatgcttggagaaaacgggaatcgatccgcggacgatcagttatgtggaagcccatggaaccggcacgtccttaggagatccgatcgaaatacagggattagtgaaagcgttccgccaatatacgcaggatcggcagttctgttcaatcggttctgtaaagtcaaacattgggcacgccgaatccgccgcggggatcagcggtttaagcaaggttgctcttcagcttcaccatcaaaaacttgtgccttctttgcattcggaagaactgaatccgtacgttgattttgaaaagtctccattttatgtacagcatgaaacagaaacgtggaagcagcctgttatcaaggagaatggggaagacgtcccttatccgcgacgggcggggatcagttcttttggcgcaacaggttcaaacgcacatattatccttgaggaacatattcctcaagcagcggagcaggacgtttctttgtcctcagattctgacatatccgcagttattccgctttctgcccgtaatcaagaacgtctccgtgtatatgcaaaacgtctcttggattttcttcatgatgggattcagattagagatttggcgtatacattgcaggtaggccgtgaaccgatggaagaacgggtttctttcttagcatccggaattcaagaattgagcgaccaattgaaggcttttatagaaggacgaaaagccattcagcattgctggaagggccgcgtgtcaagaggaagcgaaccatcgcgtcccgccgaatcggtacataaattgctggagcaaagaaaactcgatcagattgcggagcagtgggcgaacggatctggtgttgactggaagctgctttacgagggaagcaaaccaaagcggatcagcctgccgacttacccatttgagagggtgcgttattgggtgccgaaagcggagaaaaagactgatcgttcaaaacaggagcggcacatcctgcatcctcttctgcatcaaaatgtgtccgacatatcgggtgtccgcttccgttcagcgtttacaggacgtgaatttttcttgaaggatcatgtcataaagggcgaacacgttttacctggcgcagctttattggagatggttcgggcagctgtggaaagggcagctgcggatcagttcccgacaggattccggctccggaatatcgtctgggtccggccgttcgccgtcacggaacagcagaaagatatagatgtacgtctatatcctgaggaaaatggtgagattacatttgaaatctgccgggaccctgaaagcgcagaggagtcgccgattgtatatgggcaagggagtgcagtgctttgtgaggctggtgaaaatccggttatcaacattgaagaattgaaggcaagctataatggccggacgctgtcaccttttgattgctacgaggcttatacagaaatgggtattcattatggtgacagccacagagcgatcgacagcctatatgccggcgaaaacggagttctagtgaaattgacgatgcctcctgtaatctctgatacagaagaccattatattctgcatccgagcatgatagattcggcatttcaagcatctatcggtttgaggctgggaggagctacgagtttagaagacagaaaggcaatgctgccttttgccatacaggatgtccaaatcttcaaaggctgcgaggcatctatgtgggcgcggatcacatatagcgagggcagtacagctggggatcgtatgcagaagcttgatatcgatttatgcaatgaagaggggcaggtttgcgtgcgattgacgggctattctgcaagagtgttagaaacaggtcaagaagatccttctgaagcgactgacacgctattgttcgaacatatttgggaagaacgtgctgcagagaggaaagagctcatagagtacgacacacataaagtcgttatctgtgatgttggagaacaaatggaaagcctccaaaatcatcttgactgtacagttctgcagcatgatacagagacaattgatgaacggtttgaaggttatgccatacagttatttgaagaaatcaaacagctaatgcactcaaaaacagggggacatacattcattcaagtggcggtgcctgcgttggacgagcctcagctattaagcggcttaactggattgctcaaaacggctgaactggaaaatccaaaactgacaggacagttgatcgaaatagagaccgggatgtcagctggtgacctattcgaaatattggaggaaaacagacgctatccgcgtgacacgcatatccgtcactggcaagggaagcgatttgtaagcaagtggaaagaagtgtctggtgagcacctaagagctgatatgccatggaaggataaaggcgtgtatctgatcacaggcggtgcaggcggtcttggattcatctttgcaactgaaattgcgaaccaaacgaatgacgcggttgtgatcctgacaggacgctctccgcttgatgaaaggaagaagaagaagcttcaagccttacagaaacttggcatccaagcgatttacagacaagctgatctggctgacaaacaagcggttgatgccttattaaaagaaacccaaaacgtttacggagacttagatggcatcattcatagcgccggtttaataaaagataatttcattatgaagaaaaagaaagaagaggttcaaaccgttcttgctccaaaggtcacaggactggttcaccttgacgaagcaacgaaagatattccgctcgatttctttatccttttttcctcaggtgccggagcagtaggaagcgcgggacaggctgattacgcaatggccaatgcatttatgaatgcatttagcgaatatcgtaatggccaagcagagctgcacaagcgttacggaaaaactctttcagtgtgctggccgctgtggaaagacgggggcatgcaaattgatgcggaaactgcaaggatgctgaaaagagaaacaggcatggtggccatggaaacagatcgtgggattcaggcgctatatcatggctggacgtcagggaacccgcaagtgttagttgcttccggtgttactgatcggattcgtgcatttttacatgaaacgggacatggcaaaggccaatctcacaatatcaaaaaaagcagtctcaatcaggaggcagaaaaagcagacatcattggggaaattgatgaagagatactaagagaaaaagcggagaactattttaaacaggtgctttcttcggtgattaagctgccagctggccagattgatgctgaagctcctctcgaggattacgggatcgattctatcatgatcatgcatgtaacgggtcaattagaaaaagtattcggatctttgtccaagacgctgttctttgaataccaggatattcggtcattaacccggtattttattgattcccgcagagaaaaactgctggacatcttgggatttgaaacgggaaaaccttctgttgaaagaaaatcagaacctgaaaaacaagaaatcccagttatcccaagaaagtctggatttcttcctttgcaagataaagagcagaagcaggtaagagagaaggaaacggaagaaattgcgatcatcggtatctcaggtcgctatccgcaggcagacaacattgatgaattatgggaaaacctgagggacgggcgagactgtattacggaaattcctgcagaccgctgggatcacagtctttattatgacgaagataaagacaagcctggaaaaacctacagcaagtggggcggcttcatgaaggatgtagacaagtttgacccgcagtttttccatatttcgccgcgtgaggcaaaattaatggacccgcaagagcgtttatttttgcagtgcgtgtatgaaacgatggaagacgcaggctatacaagggagcatctcggccgtaagcgtgattcggagcttggcggaagcgtcggtgtttacgtcggtgtcatgtacgaagaatatcagctgtacggggcacaagagcaggtgcggggaaggtctctggctttaacgggaaatccatcatccatcgcgaaccgagtatcttattattttgattttcacggaccgagtattgctttagacaccatgtgttcttcttctttaacggctatccacttggcctgccaaagcctgcagcgcggagagtgtgaggcggcattcgcgggcggcgtgaatgtgtcaatccatccaaataaatatttgatgctcgggcagaacaaatttatgtccagcaaaggccgatgtgaaagcttcggacagggcggagacggctatgtgccgggggaaggcgttggagcagtgcttctgaagccattgtctaaagcagttgaagatggtgatcacatttatggaatcattaaggggacagccattaaccacgggggaaaaacaaacgggtactcagttcccaatccgaatgcccaagcagatgtcatcaaaaaggcgtttgtggaagcgaaggttgacccgtgggcagtcagttacatcgaagcccacggcacgggaacctctctcggtgatcctattgaaatcacagggctgtccaaagtgtttacgcaagaaaccgatgacaaacaattttgtgcaatagggtcagccaaatcaaatatcgggcactgtgagagtgcggcaggtatcgcaggagtaacgaaggtattgctccaaatgaaatacaggcagcttgcgccttccctgcattcaaacgtgctgaacccgaatattgatttccttaactcgccgtttaaagtacagcaagagctagaagagtggaagaggccgatcatcagtgtcaatggcaaagacatcgaattaccgagaatcgcaggagtctcttcatttggtgccgggggtgtgaacgcccatattttaatagaagagtatgattcggaacctgtggaggagcgtttaccagcgaggaaacagccggctgtcattgtgctctcagcaaaaaatgaggaaagacttcagaaacgcgcggagcgattgctgcataccattcgtgaacaaacatatgttgaagcagatttacaccgaattgcctatacgcttcaagtcggacgggaagcgatgaacgaacggctggcgttcgttgcggaatcgatgcgggagcttgaagaaaagctgaatgaatgtatctccggaacagaaaatcgtgaatatgtctatcgcggacaagtaaagcgcaacaaagaagccattgctgcttttgctgctgatgaggatatgtcaaaaacaattgaggcatggctgcaaaaaggcaaatatgcgaaggttttagacctatgggtaagaggtttgcgcatcgactggagcacgctatatcaggatcaaaaaccgcagcgcatcagtttacctgtctatcctttcgcaagagatcgctattggatagacgtacatgcaatggctgaggaaaaaagaacggaggagccattcgctccggtacagcccgtccttccaaagccgtctgtagccagagaagccagcggcaagcctgccaatattacgttacagcctttaatgaccaatcaggatcgtttagagcgttttccatcagatacagaaacagagacgatcacggcggaagccttgtgcgatgaactgacagcgggcttagcggaagtgctgtacatggaccaaaacgagattgatccagacgaagctttcatagatatcggtatggactcgattaccgggctcgaatggataaaagcaataaataaacagtatggcacatcactaaatgtcacaaaggtatatgattatccgacaacacgtgatttcgctgtttacttagcacacgagttaagcacacaggctggggagaaaaaacaaacggagacgtacacgccgatcagacaaaaaacagcggtacctgctgctaaaccggctaatatatctctgcagccgttagaacatcatcagccagtgcaagaggagggtgaagaaacgattcaatatgcagcggcagaaatatctgcatcaagacaatatactgtagcaattgaaacgctgcatgaaaacttgagggaaagcatagcagacgtgttatacatggagccatacgaggtggatattgacgaagcgttcatagatatcggaatggactcgattaccggactcgaatggataaaagcggtgaacaagcaatacggaacgtcttttacggtaaccagggtatatgattatccaacgatacgtgattttgccgaaatgctaaagtccgagcttggaactcatcatgatagagaggtagagcatactgttcctatcgaagcagtccagcaaaagccagcagcaccatctaatccaaagccggcagaacggccccttcagcctgttcaacatccaataaagaaagaacatgagaagaaaacggtacctgttcatcaagactacccggaggatgcgatagcgattgtcgggatgtcgggaagatacccgggcgctcgtaatgtaagagagtactgggataacctggttcatgcgagaaatgctattcgggacattccaacatcacggtgggatgttgacaaatactatgatcctgtcctcaacaaaaaaggaaaagtctattgcaaatcaatggggatgcttgatgatattgaacattttgatccgttgttttttaatattccgccgtcagaagctgaactgatggacccgcagcatcgaatctttttgcaggaaggctataaagcctttgaggacgctgggtacaacgcccgaactttaaatgagaaaaaatgcggtgtatatctcggcattatgagcaatgaatacggggtcatgctgaaccggcaggcaagagcaaatgccaccgggaacagctttgcgatcgctgcggcgcgtattccatattttcttaatttaaaagggcctgcgattcctattgacaccgcttgttcatcttcattggtcggcacacatttagcgcggcaggcacttataaacaaagaaattgatatggcgctggtcggcggggtcagcttatacctgacgccggaatcttacatcagtatgtgtgaggccggcatgctttcacctgatggacaatgtaaagcatttgacaatggcgcgaatggttttgtgcccggcgagggtgcgggtgcgctggttctgaaaaggctgaaagatgcagaagcggaccgtgaccatatttatggcatcatcattggctcgggtattaatcaggacgggaaaacaaacggaatcacggcaccgagtgcaaaaagccaaatggacctggaaagagacatatatgaaacatacggcatacatcctgagagtatcagttatgtcgagatgcatggcacaggaacaaaacaaggcgatccaattgaattagaagctctgtccaccgtatttcaagaaaaaacagacaaaaagcagttttgcgcaatcggttccgtcaaaagcaatattggccatacatccgcggcggcaggagtagccggggttcaaaaagtgttattatgtatgaatcataaaacacttgtgccgacattgaacttcacgacaccgaatgagcattttgaatttgagcattctcctttatacgtaaatacggagcttaagccttgggaaacgggtgatggaaaaccgcggagagcatgtgtgagctctttcggatatagcggaacgaatgcccatatcgtgatagaggaatatcagcctgaaaagaggagcgatccattaacaaagcagcaccgctcagcattatttgtactttcagcgaaaaaagagaagcaattgaaggcctatgcggaagcaatgaaagatttcgtaacttccaatgaagatatcgatctggaggatatggcatacacacttcagacgggccgggaagcaatggattatcgcatggcgtttttggcggattcgagagaaatgctgatcaaagctttagatgattatttggctgaaatgccgaacggcagcatatttgctgctcacgtgaaaacgaagaagagcgaaatcaagctgtttgaaacggatcatgatgccaaagcattgctgcaaacatggatagagaaaaaaaggctggagaaagtagcagagctatgggtgaaagggctgcagatagattggaacaagctttatggggaatacacgcctcgccgaatcagcctgcctgcttatccgttcgcggaagagtattactggctgccaactcaagaaggcgaacccgaaaccattgctacagcaatgcctcaattcgaactgatgccaaagcgctgctttctgcgtaaacagtggcagccttgtccgattgaaccggcagaaatgacgaatcaaaccgtcgccattttggcaaatgaggagacaatggcattagcggaagagctttcgacgtatttctcgacataccgtatatttgacagccaagagctggatcgggtatctgctgctgactatgaacacgttgctggagcaatcgatctgatcgggtgcggaacgagccatgagcattctatgggctggataaactggctccaaaagctgatcgagcaaggacgtgcaagcaagcatcatttgacggtcttgggtgtaacaaaggggctggaggcctacgcaaatgagggtgttattttgtctggtgcttcacgggccggtttataccgcatgcttcaaagtgagtacagccatcttacttcaagacatgcagatatggaatgcgaagcctctcatgaggagctggccagactgattgcagttgaatattatgccaagagcacagaatcagaagtctgttatcgaaacggacagcgatatcgcgcatatttgacagagcagccagcagaagccgctctaagtcataagcaagtatcgttttcaacagacaaagtcctgctcattacaggcgggacaagaggtctcggcttgctgtgtgcgcggcattttgtgaaaacatacggcgttaagcggctggtccttatcggccgtgaagagcttccaccgcgtgaccagtggaatttggtaaaaatttcctcgcttgccgagaaaataaaagccgttcaagagctagaagacatgggtgcgcaagttcaggtgctgtctctggatctcacagacagggttgctgtcgaacagagcctgaagacaatacacgaaacaatgggggcgattggcggagtcatccattgtgccgggatggtgaacaaacaaaacccggcttttatcagaaaatcactagaagagatcggacaggtttttgaaccgaaagtcgaaggtctgcaaacgttgtttgacctgcttcaagatgaaccattggcgtttttcaccttgttttcatcagtatcagcggccatccctgcactagcagcaggacaagctgattacgcgatggcaaatgcttttatggattattttgcggaggctcatcaagataaatgtcccattgtaagcattcagtggcctaactggaaggagaccggtttaggcgaggttcgaagcaaagctttagaacaaactggattgatcagtttgacaaacgacgagggattacagctgcttgaccagattctatcagacagacagtatgctgtcgtgctgccggcagtaccagatacaaacgtttggaagccggataagctgatgcagccgtcattgcctgtcgaagctctctcgcatcctgagacgaaagagcaaaccggcactcgcaacctgttccctgaaacagtcgactggctcgtaactcttttttcagatgaactgaaaatagctgcagaagactttgaaacggatgaacctttccaagaatacggaatcgactcgattatattggcccagctggtacagcagatgaaccaacaattaaatggagatattgatccgtcaatcttgtttgaatacccgacaatagaatcctttgcacactggctcatttcgaaatatgacatatcagctgttttacagccatctgttcctgagaaacagacacctctcaagccgcaatcagcaatgaaacagaagctggtgccagaacagcggccgcaacagataagccatgaaaaaacggcacttcttgctgaggacatcgctatcatcggtcttagttgcaggttcccgggagcggaaaccctagaggaatactgggatttaatacgtgatggacggtctgcgattgcgcctgttccgcctgaacgattcgggaactccagctcgaattacgcgggcctcattgatgaaatgaaccgatttgatcatgatttcttcatgatgtccgaaagcgatgtcagagcgatggaccctcaagctttggctgtattggaggaaagcttgaagctatggtatcacgcgggttatacagagaaagaagtgaaaggcatgagggctggtgtttatataggaggccgcagccagcacaagcctgatccggccagtctttcaaaagcaaaaaatccgatagtcgctggtggacaaaactatttagcggctaacatctcacaattttttgacttgaagggaccgagtattgtcctggataccgcttgttcctctgcactggtggggctgaatatggccattcaggctctgcgaagcggagatattgaggcagcggttgtaggcggcgtcagtttgcttgatgctgatgcgcatcgaatgtttcatgagcgcggacttttatgtgacaaaccgtcattccatatttttgataagcgggcagacggtgtcattttaggagaaggcgtgggcatggttctcgtcaaaaccgtcagccaagcggttgaagacggagattccatatatgcagtcattaaagccgctgcgattaataatgacggaagaacggcaggcccatcatctccgaatctcgaggcacaaaaggacgtcatgctgtcagcgcttgaaaaaagcggcaaaaagactgaagagatcagctatctcgaagcgaacggatcggggtcggcagtaacagatttacttgaattaaaggcaatccagtccatttaccgttctgaatcaaaggctccgttagggctgggatcggtgaaacctaacatcggccatccattatgtgcagaggggattgcgagcctgattaaagtagctttaatgctgaagcatagacaattggttccgttcctgtcaggtaatgaaaatatgccgtattttgatatagaaaaaacagatttgtatttcagcagatcgcaagccgagtggaaggagacaacgccggctgcggcaattaattgttttgcagatggcggaacgaacgcccatctcattatagaagcctggaatgaatcggttgctcgtccaattagaagaaaacctctgcctttgccggaattaaataggcagcccgttttaatcaaaccatcagctcaaaacgtgcaggaaaaagtgcattcagacacaggggcttctaaagatatgttttggaaaactttcaaataagagaggagtgggaaaatgataactgaacaactgcacatttcattaaataatccaatcatgtccaaccacaaggtatatggacaagcgttattacccggccttgcttatatagatttgatctaccaagtattccaggaacatggttatgtataccaagagcttgaattaaaaaacctgaccattttttaccctttgatcgcagatgagtcatatgacattgccctgaccattcacgtgtctgaaagaaaggaagggacatggtccatcatcatcgacggacaaaaacagcatggagaatcactatctgacaagagacaatatgtgactgctgacatgcatcgtaaagagcaaaccgcttttgccgaatcaatagaccttaatcagtggaaaagtacagctgacaggattctgaatttagatgaaatctatgaacaatgccgatctcaagagttagtgcataccggcatgatgaaggcggaaggacagatttatgaagccaaagagggggctgtaattgatttagcagtcggacaggaagcattgcgtcattctgatgcttttctgtttcatccgacgcttattgacggcagcggcataggttcaagctgcctgatctcagatcaaacgatgtacctgccattgtattatgaatcgttttctgcttcagaacgattgcaaaaaggatgtacagcacggatcctctcctcatctgtgcgccaaaagaaagagctcacttatatgacgattgaatattttaattcatcaggacaaaaagtggccgagctgaaacaatttgcaggcaagtctgtacggaatatgtcagcctttcattctccaaaagaaattcaagaagaaagagctgctgtctctcagaacatcagtcaggactatcccgcatttgaaatgtatttgcgtcagctgcttgctaagcagcttgaaaggccggcagaacaaatggatatccacgctgggtactatgagcttggtctggattctccgtcattgcttaccgtggttcaggaaattggagataaggttggagcggatcttgctccgacactgctgtttgaatttacaacaattgcagaactagctgctcatcttgctgatcactattcaattggagaggcggacgatgctgtccgccaatctccttcaccaatgaaggattctcctgatggtgttacctcttcaccagagatcggggaggacattgccattatcggaatggcgggacgctatcctaaggcaaaaaacatacaggaattttgggaacatcttaaagcgggtaccgactgcatcacagagattccaaactcacgctgggagtggaaagaaaacaatggacaggattcacctgcaggcaagccactctcgaaatggggcgggtttatcgaggaggctgattgctttgatcctcaatttttcagaatctctccgcgtgaagcggaaatgatggaccctcaggaacggttatttttagagacatgctgggaagctattgaagatgcgggttatacaccagagacaattgcttcaccgcagggagaaaataaaagacagcatgtcggtgtgtttgccggcgtaatgcataaggactattcccttataggggctgaagctctatcagaacacaatccatttcctttatcgctgaattatgcgcaaatcgccaacagggtctcttactattgtaatttccacggcccaagcatggcggtggacacggtctgctcttcctcattaactgcggttcatctggcaatagagagcatccggaatggagaatgcgaggccgcgcttgccggaggcgtcaatttgtcattgcatccggctaaatatatcagctatggcagtgtaggaatgcactcaagtgacggctattgccatactttcggcaaagacggagatggctacgtatctggagaaggtgtcgggacagtattgctaaaaccgctgcgaaaagctgaacaggacggtgaccgaatctatgctgtcatcaaaggaagtgcgataaatcatgtaggaaaagtaagcggaattacagtaccgagcccggtagctcaagctgatgttatcgaagcgtgtctagaaaaaacaggaattgatccgcgcaccatcagctatgttgaagcccatggcactggcacctcattgggagatccgattgaaatacaggggttagtaaaagctttcagccgcaatacgcaggacaagcaattctgttcaatcggttctgttaaatcgaatattggccatgctgaagctgcagccggcattagcggcttaacgaagactgtcctgcagctgcatcataaaaccttggtgccgtcattacattcagaagagctgaatccttatttgaagcttgatcaaaccccattttttgtccagcatgaaacaaaggaatgggggcagccatcttttacagaaaacggggtggacgtcacatatccccgccgtgccggtttaagttcgtttggcgcttcaggatcaaatgcgcatcttattttggaagaatatattccggccgagagccattcagaaacgattttaacgaaaaatgaaggaatagtgatacctttgtctgcgagaaacaaagatcgtctgcaggcttacgctcttaaacttcttgattttcttagcgaggacgtcaatcttttagcgttagcttataccatgcaggcagggcgggttgaaatggaggagcgtgcggccttcatcgtaaaagacataaaagatttaacggctaaacttcgggcgtttgccaatggagaagaagagatcgagggctgctggaccggacaagccaaggagaatcaggaggcggctgggctagcatcggtaaatgcgctgaataacaatttgacaacagacagtgaaatgatggaaatggcgaaagcatgggttcaaggacagcgggtcacctgggacgacctatacggcgatcgcaagccgcttaaaatcagtgttccgacctatccgtttgcaagggagcgctactggatcccggttcctgaaatgaaaaccagcactgtgaatcatatcttacatccgctggtgcaccgcaatacatcagactttactgagcagcgctttagctctgtatttacaggcacggaatttttcctttcagatcatgttgtacagggacagaagattttgccgggcgttgcctatttagaaatggcaagggaagcagcggaaaaagctgcaggcgatctggacggcaaacaaagagtggtgtcgcttaaagacattgtgtgggtgcgtcctatcacgattgaaagtgaaccaaaagaaatacatattggcctttttcctgaggataacggggaaatctcctttgacatttatagcagctctgaacataaagaagaagccctgacgatacactgccaaggccgcgctgtcatttcagatgaagcggacacttccattttaaacctttcatcaatacagacagaatgcagtttggacacagtgacgtcagaacaatgctatgcagcgtttcgaaagattgggcttgactatggagagggctatcaagggattgaaaaagtctatgtcggcaaagatcaattgcttgcaaaaatctcgttacccgcttttctaaaaaacgacaagcagcattttgcgctccacccgagtttgatggattccgcgttccatgccacagtcggttttatcgttagctcagtcaatgccgctggacaagctcagacgctgtctcttccatttgcgttgcaggaggttgatattttcagcccatgtccagagaagatatggtcttatattcgatacagttcagacagtaaagcggaggacaaagtcagaaagtatgatattgatttatgtgatgagaacggacacgtttgtgtgcgaatgaagggtgcctcgatgcgggcacttgatggagagcggcattcaaggtctcaactagtaactgattctcagctgaccgggcatacgatgatgatccccgtctgggaaccagtctctctagaagcggaggataatgcttcgtttgctggtacacgagttgttttatgcggtgctgctgaagctgatcgggcattaataaagcatcattatccgcaagtatcctttatcgatatccggcctgcagatgacattgagggaatagcggacaaactgcaagcgtacggaagcattgaccatgttttgtggattgccccgtcacaccggggaagtataggtagtgatggacaagaagaagctgttcttcacttatttaagcttgtgaaagcatgcctgcaattaggctatggcgagaaacaacttgaatggtctcttgtgacaatccaagcgcagccggttacgcaacatgaggcagtacaacccgctcatgcaagcattcatggacttgccggcacaatggcaaaggaatatccacactggaaaatccgtcttctcgatcttgaaaaaggctgcacatggccggtaaatcacatgtttgcgctcccagctggccgccttggccatgcttgggcctatcgtaatcagcaatggcatcagcagcaattgatcccatatcggcactcactgtcaggcgacacgctatatcggaaaggcggagtctatgtggtcatcggaggagccgggtatatcggagaggcgtggagtgagtacatgatccgccgctaccaagcgcaaatcgtttggattgggcgaagtcaacttaatgctgccatccagtcaaaaatagaccgactttcggcgcttggccctgagcctttctacattgcagccgatgcagccgataagcattcattgcagcaggcttatgatcaagtgaaaatgcgccatcctcatattcacgggattgttcactctgcgatggttttatttgagcaaagcctggaaaaaatgaagccggaagaattcaccgctggactggcggcgaagatcgatgtcagtattcggatggcccaagtgttccgccaggagaatgtagattttgttttattcttctcttcgcttgtagcccatatcaaaaatgtgaagcaaagccattatgcctctggctgtacatttgcagatgcttttgctcaccggctttctcagagctgggcatgccctgtaaaagtcatgaactggggatattgggggaatagtgaagcggctgaggatgaacattatgtacagctcatgaatcaaatcggcttaggtttaattgagcctgcggaagctatgaaggcgctggaagccctgctttctgggccagtcagccaaacagctttcattcatacgacaaagcctgtagcagtcgaaggcgtgaatcagaatgaattcatcgctctttatccagagcaaccttcagcagatgcagagagcctgatggagcgtctgccgactacggcacgatttcaaagagtgacacatgaagagcttgatgatcttctttacaggctgttgttaggacagcttcaaacagccgggctgtttgatggttatacattatcggttgaacgtcttcaacaatataagactcgtgaattttatggaaaatggattcggcaaagcagcgaatttctcttgcagcatggctatcttaagaaagttggagattcattggtgaggaaggaccaagcagaggatatcgagctgctttggcaagaatggaatgcgaaaaaagaaaagtggcttaaagacagcgagacaaaggcgatggttgtattagcagaggccatgctgaaagcattaccggatattttgacagggaaagtccctgcaacagatatcatgttcccgcattcctcgatggaactggtggaaggcatttataagcataacaaagtggcagattattttaataaagtgcttgccgatacattattagcttatctggatgaacgtctgaagcacgaccctgaggcatcgattcgcattatggaaataggcgcaggcacaggcggcacgagtgccggaatctttgaaaaactgaaaccatatcaaaagcatatcaaagaatattgctatacagatctgtctaaagcatttttgctgcatgcagaaaaggaatatggggcggaaaatccgtacctgacatatcagctttttgatgtggaaaaaccgattgatcagcaggaatttgaagcgggaggctatgatgtcgtcattgccgctaatgtccttcacgcaacaaaaaatatccgtcaaacactgcggcatacaaaagcggtaatgaaaaacaacggaatgctgctgctgaatgaaatggcgggaaacagcctgttccctcacatcacctttggtcttttggaaggctggtggctgtatgaagatcctgcagtgcggattcccggctgtccaggcttacatcctgacagctggaaagcggcacttgaaagcgaaggctttgaatctgtctttttcccggccgaggcggcacatgatctgagtcaccaaatcgttgcagcctcaagcaacgggctggttcgccgtatgatgaaaaatgtgatcttgccggagaaggttgtttcacaagcgtctaatcaggagccagcctacattcataccatagattcagaggaagctggacaatcaaaacatgctctcctaagagaaaaaagcacagaatatatgaaaaaactaatcggggaaacgttgaaaattcctgcaggaaagattgagtcatctgaaccgcttgaaaagtacgggattgattctatcgttgttgtccaactgacaaatacattgcgtaaagaatttgaccatgtaagcagcactttatttttcgagtaccagaccattgacgcattagttgatcatttcatcaaaacaaaaacagaagcgctgatgaaattaacaggtcttgaccgtcaagttcaacaacagacaccggccgaaagcagaacccaatcctcacagaaacctgatcaggccgctaaaagaacacggcgctatcgcaagcttggcttcagcggggagaaagaaacaccgacaaacactcttgcaagccgtgacgttgccattatcggcatttctggacgctatcctcaggcggaaacagcagaagacttttggaacaacctaaaagaaggaagaaattgtattgaggaaattccgaaagatcgctgggattggaaagcttattacgataaagaaaaagaaggatcaatttatacgaaatggggcggatttatcaaggatatggacaagtttgacccattattctttcagatttctccgcttgaggcagaaagaatggaccctcaggagcgattatttctgcaaaccgcttatgcaagtattgaagatgcgggatacacgcctgactcgctctgttcaagcagaaaaatcggcgtctttgccggagtcatgaacaaaaattatccgaccggctacggctattggtctatcgccaacagaatatcctatttactgaatttccaaggcccgagtcttgcagtcgatacagcctgctcatcctccctgacagcgattcatttagcgctggaaagcatctatagcggatcgagtgattgtgccattgccggcggtgtcaatttagttgtcgacccggttcactatcagaatttatctgtcatgaatatgctctctgctagtgatacatgtaaatcattcggcgatgatgcagatggatttgtcgacggtgaaggcgtaggcgccattgtgttaaagccgctgcagcaagcaatagcggacggtgaccatatttacggtgtgataaaggcaagtgccattaatagcggaggaaaaacaaatggatacacggttccaaatcctcatgcacaggcacaggtaattaaagaagcaatggagcgcgccgacattcctgcccgaaccatcagttatttagaggcgcatggaacaggcactgcattaggagatccgattgagatagcggggttaacaaaagcatttgagaaagatacgcaagagaaacagttttgtgcgatcggctccagcaaatcaaatatcggtcattgtgaaagtgcagccggaattgcagggctgacaaaaatactttttcagtttaaatatggccaaattgcgccatcattgcatgctcagcggttgaatccgaacatcgagttcagccatacgccatttgtcgttcagcagcaacttggtgaatggaaacgcccggtgattggcgggcaagaggtgcctaggcgcgctggcttgagcagttttggcgccggagggtccaatgcccatatcatcctggaagaatatattccaagaacgggggcgcaaacgccgaaagaccatcctccagcgctgattgtgctgtcggccaaaaacatggaacgcttgcaagaaaaagcggaacagctgcttacagccatcaaacaaaaaaggtaccgcgaaacagacctgatcaggatcgcctataccttgcaaacaggccgtgaagcaatggaagaacggctggcctttatagcggaatcactagaggatcttgagagaaagctgaacgattttatcgaaaacaaagcagacagcctgtatctggatcgcatcgaggataacaaaaaagcgttagcagttttatcagcggatgaggatacggaaaaaatcatagaagcatggatgagcaaagggaaatacacgaaactactggatctttgggtgaaaggcttgtctttcgactggggcatgctgtacggcacccaaacgcctgtccggatcagtcttccggcatatccatttgcaaaagaacgttactgggcaccaggcgcggcaaaggctccggcgtctatagaacaggatcatgatcagcaaacagaagaacctttcaaggttatgacttttcaagaagtgtggaaagaagagccggcgactctcacatcgaaacgtatcaaaacgctcatctgttttctgactgaaagagaaaagcaaaacgcatttgcttcagccctgaaaaacgttgatcaagacaccaaggtcatttttatatcacagggcgaagtgtacagcaaacagtctgaatatagctaccagattgtgcggcaagaacccgttacttttgaaaaggccttccagagcattaaagaagaacttggagagccagatgcaatcctctatatgtggcctatggaagacaagcgctgtataaaggaccattcctgtattgtttacctattacaaggtatgtccgcagcaaagcttcatccttcacggctgctgctggcaggatgttttgaagatggtcttgaccgaagttatctggaatcatggattggcttcgaacgttcactcgggcttgtcctcccgcacacaaaagtgactggaatctttcagccggtggaacaaggatcgatggatgattggacacgtaaaatatggggagaattacaggcttcagctgaacaaacggttttgtatcagaatctgaaacgatatgtaaatcacattgaacagacaacgatacaaccggacgacagcaaattgaagtctggcggtacttacctgattacaggcggtgtaggagggcttggttatttatttgccaagcatttggccaaaaactatgccgcaaacctgattttgacagggcggtcgccttttaatgatgaaaagcaaaagcaaataaaagaattaaaggatctaggcggcgaagcgatgtatgcagaagcagatgtgtctgatcctatcgcaatgggagactgcgtaaaaagagggaaagaccgattcggtgccatcaacggtgtcattcatgcagccggaatcgagagcgactctgctatttttgacaaaaagatcgaaagctttcagcgcatcattgaaccgaaaatcaacggcacgatagcgcttgatgaatggcttaaaaatgaagaccttgattttatgtgttatttttcttcttcttctgcggttttaggggattttggatgttgtgattatgcgattggcaataggtttcagatggcttacgcacaatacagaaatgagctgcataacggtaaaacgtttgtcatcaactggcctgtatggaaggatggcggaatgaagatcggtgatgaggaaacaacggatatgtacctgaaatcaagcggccaacgcttcctagaagccgaggaaggcatccgtatgtttgagcacatcctagctcagcaggatgctcagcatctcgtgatagccggtcagcccagccgtgtcagcagatttttaggaatgactgaaccagctattccagaaccggccactcaagcccctctagcacaagaaaacaaggatgaggtaaaaacgttaagcattgaaaagcgtttagaacacgacttgaaagagcatattcacacattgcttaagatttcaaaggacaagctgaatttgaacaaaaattgggccgacttcggatttgattcaatctatttggctaaattctcgaatgtgttatcaaagcatttcaacatcgaagtgacaccggctttatttttcggctattcgactttacaagaattgatcggctttttcttaaccgatcataaagagctgattgaagcattttaccgggatgatgcatcagaggcgcaaaagccccctgaagcttatgcagcaattcctgtagctccagaaccggaaaccagtaaacaaagcattcggcaggttcacgatgagcctattgccattatcggcatgagcggcaggttccctcaagctgattcggtccatgagctgtgggataatctgaaaaaaggtaaatcgtgtatctctgacatcccgggcgaacgccgggactgggggagagctaacagagatccagaaaaagcagtgccaaggtggggggcatttttgaagggcatagaccggtttgatccgctgttttttcaaatatcgcctaaagaagccgaaagcatggacccgcgccagcgcatttttctagaggaagcatggcacacgtttgaagacgccggctatatgggagatcggataaaaggaaaatcctgcggtgtttatgtaggtgtggaagaaggggaatatgcgcatctaaccggagatacggattacattaacggaacacaaaacgccacattgtctgcgagaatcgcatacgcattggatttaaaagggcctaatatggctttgacagcagcatgttcatctggactggtagcgattcaccaggcatgttcagctctgcgtcagggggattgtgaaatggctttagccggcggcgtcagcttgaatatttctcacatgtcttttgaggcgctgacaagggccgaaatgctgtctccgaacggacaatgcaaagtgtttgaccaggatgccaatggtcttgtgccaggtgaagcggtggctgctgttctcttgaaaccattatcaaaggcaattgaagataaagatcatatttatggctgcatcaaggccagcggcgtgaattacgatggcaaaaccaacggcattactgcgccaaatccttttagccaggcagaattgatcgaaaacatttatgaaaaaaatgaaatcaatccgctcgatattcaatatgtgatggcgcacagtaccggctcgaatcttggtgatccgcttgaggtccaagcgttaacgagcgtgttcagcaaatatacgaagcagaagcaattctgtatgatcagctcaattaagcctttaatcggacatacatttgcagcgtcaggaacggttgctttaatcagtatgctgatggctatgaaaaaccagatgattccggccactcatcactgtgaatcggaaaaccagtatattccgtttaaagaaagcccatttgtgctttgcaaagaaaaccgttcgtggatcaggaaatatcagaagccgaggatgggaacgatcagcacgactggaatcagcggcaccaatgcacatgcagtcattgaagaatacattccggaagatcagccgcccacacagcggcatcaagggtcaccgcaggtcatcgtgctttcagcccaaaatgacgatcggcttcaggatgctgcctgccgcatgattgcgtatctggagcagaatcataacctttctttacctgatatggcatatacgcttcaggttgggagaaaagccatggaagcaaggctcgcgatcgttgcaaacaatcagaagcaattggtgcaaaaattgaaggaatatgtggaagcaatgaagaatggtggggtatcaggccaacagagatccctttatacaggatatacagaagggattttagaagaacaagatgaagcagttctgcaagctctcgcaaaagaaagaaatttggaaaacatcgcggattgctgggtgaaaggatatcagattccttgggaactccttcatgatggcgatcacgttcgaatggtttctttacctggttatccatttgcaagggagcggtattgggtttcgtcaggcacccagcaatcagtggccgttaaacagcattcacaagatatgaaaacagagattgacgagccgaatggcaaaaaccatattcaaaagatcattgttcaatttttagcacgagaattgggcatatctgaggatcgaatcaatttcaaaagaaactttttggattatgggatggattcaattcttggccgaaaattgatgcggcatatcgaaaaaaccacgcagctgaagatggccggtcgggaaatccttgaatgtcagacagtccaagctctatctgaccatttggccttaaaagcggaaaaacaaaatcatagcgcagcagcacatcaaataaaggacacgtatacagacgggcaaatcatcggattaatgcaagaggtggcgctagggaaattggattttaagagtgtgcaaaacatcatagaagggagtaaatcgtatgaatcataaagaaattctcgatgccttcagatcaggagaattaaccatttctgaggtggaagaacatcttaaaggcatgaagcggcagttgaaaagcccgctttctgaagggcaaaaagggctgtggatgcttcaaaaaatgtctcctgggatgagtgcatatcatattcctttatgctttcgcttcagcaaaccaatacatgcagagacgttcaagaaagcccttctgtttgtacagagacaatatccgatcttagccagtgtgattcaagaagaaaatggcattccatttcaatcggttcagttatcaaaggatctttattttgtggaagaggatatatcagcaatgaaatcagcagatatctttccttttctaaaagaaaaagcaaaagaacctttccagttggaagctggtccgttatggcgcacacacctttttcatcggttagaagaatgcattgttcttataacaattcaccatatcatatttgatggtgtgtcgatgctgacattgatatcggcgctattcgaagcgtatcaacaattgctgaatgggattgagcccttgcagcagccattaacagctgattattacgattttgtcgattgggaaaaacggatgctgactggcagagaaggggaagagcatctcgcttactggaaagaacagttgtctgggagtctgccagttcttgatttgcctgctgaccgtccgcggtcttcatcacgaaaattcaaggggcaagcttataaaagcttgctcccccatcacctgagcaatcaaattaaatcgtttgcccgcaccaatcatgtgaatgaatcggttgtgtttctctccatttacaaagtgttgctgcatcattatacaaaacaaaaggatatcattgttggcgttccgacaatgggtcggcaagatgacagatttgaaaccctaatcggttattttatcaatatgatggctgttcggagcaagaatatcggatctcagccattaacagcatttattcgggaactgcagctgacagtggctgacggcctggatcatgcggcgtttccgttccctgcattggtaagagagctgaatgtagaccgatcggccgcggattctccggtttttcaaacagcttttctgtaccaaaacttttttcaggcaacaggcttgcaaaaagtgctcgaaccgtatcaaacgcttggcatcgaatatattgaagacattcggcaagagggtgaatttgagctggcgctcgaaatatatgagcaagaaaatgaaacagtgcttcatcttctgtacaaccctgatttgtatgaactgtcctccattgaaaacatgatggagaactatatgaagctcgcgcaacacatgatggatgacccgtctttgccgcttgaagcctactctttgcgattaaatcaagaacaaactaatttggtggaacaatggaatgcgacagggacaaacatcgcaaatgacaagtgtatacatgaggtgtttgaggaaaaagcgaaacaaacccccgatgcggttgctgtgatgtttgaagacagatcacttacatataaagaagtagatgaaaaaagcacatctgtggcagtctaccttcaacatcagggtgttagacctgaacagcccgttggcatttgtgcagagcgttcgtttgatatgatcatcggaattttaggaatactgaaagctggcggagcgtatgtgccgttagatccaagttttccgcaagaacgattagagtacatgctcaaagacagtcaggcatccattgtcctcacccaacctaacgttcatgataggatcagcggattaactggcagccatgtaaaagcgatcaatatcgagttagcttgccgaaacgattatacagaccagcaaagcagcggtttaaagcgggaagtaaaaccggaacacctcgcttatattatttatacatcgggaagcaccggagagcctaaaggggttatggtagagcatcggagcattatgaataccctgaattttcttgaatctcactatcctgtaacggctgaggatgcatatttattgaagacgaactatgtgtttgatgtatcgatctcagaattattcggatggtttattggagacggccgtcttgtgattcttccgcctaatggggagaaatcaccgcagctttgcatggattatattgaaacatataaagtgactcacattaattttgtgccggccatgctgcatgtttttttagaaatggcgaaagacaacaaacgattcacagaggatggtccgctgaagtatatgatggttgcaggtgaagccttccctaaagaattagtgaaaaaggcggtatcactctttacaaactgccgtgttgaaaatatatacggaccgacggaagcctccatttacgctgcgtatttcggatgcggaaaaggagatatcgcaagtcaccatacaccgattggaaagcctgtctccaacacgaaaatttatattgtggaccagcatttaaagcctgtcccgatcggaaagcctggtgagctatgcatcgctggagccggcttagcaagaggctactttaaaaagccggggcttacggctgaaaaatttattgataatccctttgaaccagggacgaagctatataaatcgggtgattcagcaaggtggcttcctgacggcaacatagaatacttgggacggattgacagccaagtcaaaatacgcggttttcgcgtcgagctgggcgcaatagaaacaaagctgagtgaatttccgggcattttagatcaggccgtagtggtgaagcagctggaaggccatcaacagctcgctgcttattatacagaggaaagcggacatgcctctgccaatccaaaagatttgcgccttcatctaaaatcgagtctgccggaatatatgataccttcacactttatccgcttagatgagcttccattatcgcccagcggaaaagtgaaccgtaaagaattagaaaaacgcgagatcgtgttcaacataaggaaaccaaatcacttgcaattaacggaaatagaggatcaggtgctgcgcatttgggaggaaacgctcaaggtcagcggatttgggccggatgacggatttttcgatgcgggcggcgattcgcttctggctgtagctgtggctgaacgaatcaaaaaagaattcgattgtgagtttcatgttactgagctgtttgagtattccacgatccgtgcaatcagtgaatacattttggagatggaaaactcagatctagccgggacacaaaatgaagatcattatgatatcaaaaaagatagaaaacacctagaacagaagattcctccttattttgacgacagtgttgcgattgtggggatatcttgccagttcccgggtgcgaaaaatcatcatgacttctggaaccacatcaaagaaggcaaagaaagcatacgattcttttctgaagaagagcttcgcgcaaatggagttcccgaagaattgatacagcatcctgactatgtgccggtgcaatctgtgatcgaaggaaaagacttattcgatcccggtttctttcaaatctcgccaaaagatgctgagtatatggaccctcagctccgcctcttattgctgcactcctggaaagcgattgaagatgcaggatatgtggctaaggagattccggcaacaagtgtatatatgtctgcaagcagcaattcatatagaacgttattgccgaaggagacaacagaaggacatgaatcaccggatggctatgtctcatgggttttagcccaaagcggaaccattcccacaatgatctcacataagctcggattaaaagggccaagctattttgttcattctaactgttcttcatcactagtcggtttatatcaggcatacaaaagcctgacatcgggcgaatcacaatatgcgcttgtcggaggcgcaacattgcacgcacaatcagcgatcggctacgtgcaccaaaacgggttgaatttttcaagcgacgggcatgtgaaggcgttcgatgcttcggcggacggaatggccggaggtgaaggcgtagcagtcatcctgctgaaaaaagctgtggatgccgtaaaagacggagaccatatttatgccattatgcgcggaataggcatcaataatgatggggcagagaaggcaggcttctatgcgcctagtgtaaaaggccaaacagaagtgatacagcatgtattggatacaaccaagatccatcctgaaacggtcagttatattgaagcacacggtacgggaacgaaattaggcgatcctattgaaatgtctgcgctaaataaagtgtacaagcaatacaccgacaaaacacaattttgcggaattggttcagtgaaaacgaatatcggccatttggatacagctgcggggttagccggatgcattaaagttgcgatgagtttataccataatgaacttgcaccgaccatcaattgtacggagccgaatccggatataaagtttgaaagctctcctttttatgttgtccgtgaacgaaaatcgttagagaaacacgcaggtgtccatcgggcggctctgagctcattcggccttggcggaactaacgcccatgcaatatttgagcaatatgaaaacatttctgatgcaggtaccgaaaacgaaggcaatcagccttacatcattcctatatcagcaaaaaatagtgaacggctccaagtatacgcgaaggaaatgctgtcctatatcagtcaagacgagcaaaggcatttctctttaagagatattgcatataccttccaagtcggccgtgaagcaatggataacaggatcgtttttatagtgaacgatctggaagagtggaaacatcagctggaagcttttgtgactggaaagccgctcgcagaaggctgtattcaaggagaaaaaacgagaatgacatccgctgaacagctgcttggaaatgctgaagcagatgatatggcttcatcgcggatatcaaaagaagaattgagaaagcttgccgagatgtgggcaaatggctttcacgttgaatggcgcaggctctatccaaatataaagccacgccgcatcagcttgccgacatacccttttgccgaagaacgatactggcctgaaagcagcaccggcgctatcacaacaattgaaccatctcgtttgcatcctttggtgcaccataatacatcggttctgtcagagcagcgtttcagctccattttcacaggacaagagtattttattgccgagcatatcattaaaggcatggcgattttgccggcggcggtcacgcttgaaatggcaagagccgctatagaacaaggaattggcggattggaggatcatgaaactggaatcaggctgaaaaatgtcgtgtgggttcgcccggttgtagcaggaagtgagccggttcaggtaaatatcggactttacgatgaagatggcggacatattgcttatcggatgtatggtgatccggaatacgctgatgcagaaccagttgtatataaccaaggtaaagcggaattgattcagttaaagcgagaaaaagcactggatctttctaagatcaagaaacaatgtgatcaaagcaaaatggatgctgcctcgttttatgaagggatgatcggcgccgattacggtccaggttacaagagtgtagaggccgtatataaaggcgacggccagctgcttgccaaattatcactgccagaatctgttgcacatacgttgggcgattatgttcttcatccaagtgtaatggacggggcgttacaggcggctgaatatttgcaaaatgtcgtcagagcggaactttcagacactgaagactttaaggcagcactgccatttgcactggaggaacttgaggtttttcgtcagtgcgtttctgacatgtgggtttatgttcaattcaactcgaaaaacaaaccgggagatttgatacagaaagtcgatattcacctatgtgatgagcatggcatgatctgtgtgcggctgaaaggattttcgacgagagtgatggaggcagatatacaaaccgaaccatcaaaaatcaacgctgaaactttattgcttcagcccgtttggcaagaacaaaaggctgctaacagcttagctgcaaaaaaatatgcagagcatctcgtattcctatgtgaatatgatcatgagacgagaaaacaaattgaagcagctatcgaggatgtccatgtatacagcctggaagcaaggccttcttcagtagatgggcgtttccattcttatacagaacaagtgtttaaaaaggtacaagagatcattcgtacgaaaccgaaagacggcattctcgttcagatcgtgacctctgccgagggagaacagcaattgttttcagggttgacaggactgctgaaaacagcttgtcaggaaaatgccaaactaaccggccaaatgattgaagtcagcagtgaagaaagtggagaaagcattgctggcaaactgttagaaaatcaaatgagcggcgattcatatgtcaaatatcaaaacgggacacggtatattgctgattggcgtgaaatcaaacaggcaaaaggagacggcagcaaaccgtggaaagacaatggcgtttatctcattacaggaggtgccggcggactaggtcatatttttgcaaaggaaattgcggaacaaacgaaaaatgcgacagtcattctggcgggccgctcacctcttagcgaaagcaaaagcaaaaagctgaaagagcttcatagcaagggggctgacatcacctaccggcaaacagatgttaccaataaaattgaagtctatcagctcattgacgacattcaaaaaagatatggccgtctgaacggtattcttcatagtgccggaatcatcaaggacagctacctggttaataaacaggcaaaagatctgcacgatgtactggcgcctaaagtaaaagggcttgtttatctagacgaagcgagtaaggatttgcctttagacttctttattctcttttcatctctttcaggaagtttagggagcattggtcagtctgactatgcggcagccaatgtatttatggatatgtatgcaggctatcgaaatcggcttgccgacctcagccagcggcatgggcagacgctttctgtaaactggcctttatggagagatggaggcatgcaggtcgatcaagaaactgagaaaaggcttgtgcaacttgccggtattgttcctatgagggcggaaaaaggaattcaggcattatatcaagcacttcattcagaggcaaaccaagtaatggtgatcgaaggcgatgtgcagaaaataaaacaaaacatgctggccaaaaacgcctcagcacctatggaaaagaaggaagcagaacacatgactgaacaaataaatagcattgatgcagacagtttgctggataaagtaaaggcgatgttaaagcgagagatcgccaagctgttaaaggtcaagcttgaaacgattgatgatcatgccgagatgacggtgtatggttttgattctatctccatgactgaattcaccaaccatatcaatcgcgcctatcagttagagctgacgccaaccgtattttttgaccacccgacgattcatgcgtttggcaagcatttgtcagaagaatatcaatcggtatttgcgaagacatttgctgtgcgcgctgtatcggctcagattcagcctgccgcgaaacaggaacaagccgtgcgtgccaaagctaaaagacgcagaaagcagcaagtcatgctgccaaacgccatacagagtgatgctgggcctgagccaattgccattgtgggcataagcgggattttccctatggcgaaagacgttgaggcgtactggaacatcttaaaagagggcaaagactgcatgacggaaatcccgaaagatcgctgggattggcgtgaatatgaaggtgatccggcgaaggaagtcaataaaacgaacgtgaaatggggcggttttattgacggtattgcagattttgatccattattctttggcatttccccgcgtgaagctgaacaaatggaacctcagcagcgcttactgctgacttacgcctggaaagcgatcgaagatgcaggatattcggcgaaaaggttgtcaggcacaaagaccggcgtcttcatcggaacgggaaatacaggatacagctctcttctatctaaagcgaactcggcaatagaaggatcagcggcagccaatacgagcccatcggtcggtccgaaccgggtcagttatttccttaatctgcacgggccgagcgaaccgattgatacagcgtgctcaagttcactagtggcgatccaccatgccatctcttcaattgaggaaggcacttgtgacatggcattagccggcggtgtaaatacgattatccttcctgaggtgtatatcagctttgataaggcgggagcactgagcaaagaaggaaaatgcaagacgttttcaaatcaagccgatggttttgcgcatggggaaggtgccggcatactgttcctgaaaaaattaaaagcggctgaagaagcgggagaccacatttacggagtcataaaaggcagtgcaatcaatcacggcggccgtgcagcctctttaacgactcccaatccgaaggcgcaggcagatgttattcagtcggcatatcaaaaagcgggaatcgatccgaaaaccgtgacctacattgaagcccacggaaccgggacggagcttggagacccggttgaaattaacggtttgaaatcagcttttaaagcattgggtgtaaatgaaggagacacatcagtcaatccttactgcggtttaggttctgtaaagacaaacattggccacttatcgctggcagccggtgcagcaggagttattaaaatattattgcagcttaagcataaaaccttagtgaaaagtctgcattgcgaaaacgtgaatccatacattcagctgaaaaacagtccgttctatatcgtacgggaaacggaagaatggaaagcgctgaaaaatgaacggggagaagagcttcctcgccgggcaggtgtcagttcatttggaatcggcggggtaaacgcccacgtgattatcgaggaatatattccggaagcatccgatgagaatataccatccatcacgccggaacatccgggtatcttcgttttatcggctaaaaataaagcgcggctaaaagaacatgcacagcagctggcagatgcgcttgataagcaatcatatagtgacgtaaatctcgcccgaatcgcttatacactgcaagccggacgggatgcgatggaagaacgtctcggggttatctccggttccattgaggatgtacagcaaaagttaaaagactttgcagcaggcaaaagcggtgtggaggatgtatttaaaggcaggattgataaaggcacactccaaatgctgacagaggacgaagagattcaagaagctgtcgagaaatggatggaacggggaaagtatgcaaaattgcttgaattatgggtaaaggggcttgatgtagactggacgaaattgtatggcgagaatctgccaaagcgcatcagcttgccgacgtatcctttcgcaaaagaccgttattggatctctgatcatattgaaaaaatcggcagcattgatgcaaatcaagcagcctcccgccttggcggagccgtgctgcatccattaatgcatcaaaacacatcgaatctctcggaacaaaggtttagctctatttatacgggagaagagtttttccttgctgatcatgttgtgaaaggccaacggattttgccgggagtggctcatcttgaattggcgcgggcagctgttgagcaggccgcagaggtagaaggtgtaccgtgcaccatgaagctaaagaatgcggtgtgggtgcggcctattgttgtagaggatcagccacagcaagtacacattaggcttttaccgggagaaaatggtgagatctcttatgaaatctatggtcattcagacgttactggcgaacagtcaattgtctacagtcaaggcagcgcggtattgaatcctgctgaaaatctgccggcggttgattttcaatctctgcgggagcagtgtcaggaaagccatttcagcgtaaacgaagtatacgacacctatcgaatgattggatttgaatatggtcctgcttatcgcggagtgaaaaaaatctatacagctgaacaatttgttttggcaaaattgtcattgcatccgtcagctgcagatacgctcagccaatacaaaatgcaccctgggctgatggattctgctttgcaggcgtcaagcattttgacaggcgccggggataaccagctgacactgccttttgctatccaggagcttgaaatcttcggagcatgctcgtcagaaatgtgggtatacgcaagatacagccaaggcagcaaggcaactgataaggtgcaaaagcgcgatattgatattttagatgagagcggcaacgtttgcgtacggatgaaaggattatctttcagagcagcggaaggcggctctggatcggcggaatctgatcaaacgctggcaaccctgatgtttgaagaaaaatgggtgcctaaggattttaaaaaagaaagtcctgagcctcattacgaacggcacattgtcatgctttgcgacatgaatggcctctcaaaagatcgcattgaatcaagattgacaggagcggaatgcatcgttttggagtcattccgcgaaggacttgcagagaggttccaagattatgccgaacaagcgcttgagacggtccagggtcttctcaaaagcagacctcagggcaatgttctgatccagctgcttacctctgcacaaagaaagcagtactcattctcagggctatcggcgctccttaaaaccgccggcctggagaataaaaaactaatcggccagacgattgaaatcgattcacatgaaaatgttgaaagtgtaatagaaaaactgaaagagaataaaaggcacacagaagatcagcacatcaaatatgaaaaaggcaaacggtacatcaatgatctggatgaaatgcaaatagatgatcgggaaataagcatgccgtggagagataaaggtgtatacctcatcacgggcggcgcaggaggacttgggtttatttttgcaaaagagattgctcgtcaagccgaacagcctgtactcattctgacaggcagatccgcgttgaatgcggatcagcaggcggagcttaacgaacttcagcaattaggggctcgcgcagaatacaggcaggttgacgtgacacaaacggaagcagcctccgagcttatcacaagcattacgtctgattacgaagacttgaatggtgtcattcacagcgctgggctgattaaagataactatcttatgagcaaaaccaatgaagagctgacacaagttctcgctcctaaggtgaaagggcttgtgaatgtggatgaggcaaccgagcatcttgcgttagatttctttatcctcttttcttcaatatcaagtgttgccggcagcgcgggacaggccgattatgcaatggctaatgcatttatggacagttatgctgcttatcggaatgcgcttgtaaccgccatgtacaggcacggacaaacgttgtcaatcaattggccgctctggaaagaaggcggcatgcgcgcgaataaagaaattgaaaacatgacgttgaaaaacacaggtgtgactccaatgcggaccgagaccggcattcaagcgctgtataaaggtttggcatttggcaaagatcaagtcatcgtcatggaaggattcaaagacatgatgagggaaaagctgactcaaaagccgtcttctgatgatgtaccaatgaaaacagtgcaagtacgggtgacatctgaagcaagaatggatcaagggaatatgtttgaccacattcaagaagttttaaagcaaacaatctctcaattgctcaaaatcaaacctgaagagattgacccggacatggagtttaatcaatatggatttgattcgattacgttaactgaattcgcaaatacactgaatgagaagtgcaagctggatcttacgcctacggtcttctttgagcacgcaactgtttatgcatttgcagggtatctgtcagaagaatatccaaatgcttttacagctcaaacgcctgccaaagctgaggtgctaatgcagcctgtcgaacagaatataaaaaatatgacgttttcgactgaaaaccgctttgtaaaaccttcggtaacaccaatgcaaaaggaagctgatcacaagcctgagcctattgcgattgttgggatgagcggcgttttcccaaaggcaaaagacgttgaggaatattggaagaacctgtcatcgggcgcagattgtattacagaggttccaaaagaccgctgggattggcaggagtattacggagaccctctgaaagaagcgaataaaacaaacgtcaaatggggcggttttattgatgaagttgctgactttgatccattgttcttcggcatatctccgctggaggctgagcagatggagcctcagcagcgcctgttgatgacctatgcgtggaaggcggtagaagaagcgggacactcagcgagaagcctggcaggaaccaaaacgggcatcttcattgggacaggaaacacagggtacagttcacttctgtcaaatgtagacatcgaaggctcagcggctgcgaatatgagtccttctgcaggaccgaatagagtcagttatttcctgaacattcatggaccgagtgaaccgatcgacactgcgtgctcaagctctttggtcgccattcatcatgcggtttgcgccattgaaaatggaaactgtgaaatggcgattgcgggaggggtcaacacggtcgtaactccgcaaggccatatcgcctatgataaggccggggcgctgagcaaagaaggaagatgcaaaacattttctgacaaagccgatggattcgcagtcagtgaaggtgccggcattctctttctaaaaaagctgacagcggctgaacgagacggtgatcatatttacggtgtcattaaaggaagtgcggtaaaccacggtggccgcgcaaattctctaacgactcctaatccgaaagctcaggcggatgtcgtaaaaacagcatatgaaaaagcgggaattgatccaagaaccgtaacttatattgaagcgcatgggactggaaccaagctgggcgatccagtagaaatcaacggcttaaaagcggcatttaaagagctgtatgaaaaaacgggggacccggctgttcatggcagccattgcggacttggatcagcgaaaacaaacatcggtcacttatcgcttgcggccggtgtggcgggtgtcattaaagtgttattgcagctcaagcataaaacgcttgtcaaaagtctgtacagtgaaactgttaatccatatatcagactggatgacagcccgttttatattgtgcaggaatcgagagagtggcaggcgcttcgggatgaagctggccgagagctgccgcgccgcgcaggcatcagttcgttcggaataggcggcgtcaatgcccacgtggtcattgaggaatatattccgaaagaaacaacccatcctgcaacagcaccagccgtgacagcacagcacccgggcatctttattttgtcggcaaaggatgaagatcgtctgaaagaccaagcccggcaattagcagactttatcagcaagcgatctatcactgctcgtgacctcactgatattgcttatacactccaagaggggcgtgatgcaatggaggagagattagggatcatcgctgtctcgactggggacttgctggaaaaactgaacctctttatagaagggggcaccaatgcgaagtacatgtacagaggcagagcagaaaaaggtatcgcacaaacattgagatcagatgacgaagtacagaaaacgctcaacaatagttgggagcctcacatatatgaaagactgcttgatttatgggtaaaaggcatggaaataggctggagtaaactgtatgacggcaaacagccgaaacgcatcagcctccctacctatccatttgcgaaagaacgctactggataacggatacgaaagaggaggcagccgcccatcaaacagctttaaaaacagtcgaatcagcagctttgcatccattgatacatgtcaacacatctgatttgtcagagcagcgtttcagctcggcctttacaggtgctgagttctttttcgccgatcataaggtgaagggaaaaccggttatgccgggcgtggcatatcttgagatggttcatgctgccgttacaagagcagtgagaagaaccgaagatcaacaatctgttattcacatcaaaaatgttgtgtgggtgcagccgattgtggcggatggccagcctgttcaagtggatatcagtctaaatccccagcaggacggcgagattgcttttaacgtctatacagaggctgcacacaatgatcgaaagatacattgtcaaggcagtgcttcaatccgtggggcaggagacattccagtccaggatatcagcgcgcttcaagaccaatgcagtttaagcacactctcacacgaccagtgttatgaattgtttaaggcgatcggcattgactacggacctggttttcaagggatagatcggctttacatcggccgcaatcaagccttggcagagctttctctgcctgctggtgtaactcacacactgaatgaattcgttcttcatccaagtatggccgactctgctttacaagcgtcgatcgggctaaagctgaattccggtgacgagcagctttctctgccttttgcgctgcaagagctagaaatattcagcccgtgtacaaataaaatgtgggtgtctgtgacatctcgtcctaatgaggacaaaatacagagactggatattgatttgtgtgatgaacaaggccgagtgtgtgtaagaatcaaggggattacctcaaggctgctggaagaaggcatacaaccgccagacgggccgacatcactaggaaactccaaagcaactcttaacggagcgcttcttatggcgccgatatgggatcgagtgcagctggagaagaggagcatttcgcctgctgatgagcgtgttgtcatcctcggaggggatgacaacagcagaaaagctgttcaaagggagtttccgtttgccaaggagctgtacattgagccgaacgcatcaattcatagaattacaggccagcttgaagcactcggatcgtttgaccacatcgtgtggatgtctccttctcgtgtgacagagtgcgaagtcggcgatgaaatgatagaagcccaagatcaaggcgtcattcaaatgtataggctcattaaggcaatgctttctttaggctatggacagaaggagataagctggacggtcgtgacggtgaacacacaatatgttgatcagcatgatattgtcgacccggtcgatgccggggtacacggcctgatcggttcaatgtcaaaagaatatccaaattggcagacaaagctgatcgatgttaaaaaatacgaagatctgccgttatctcaactcctttccttgcctgccgatcaagaagggaatacgtgggcctatcgaaacaagatttggcataagcttcgtctaattccagtacacaacaatcaaccggtgcacacgaagtataagcacggaggtgtttatgttgtcataggcggagctggcggtattggtgaggcgtggagtgaatatatgatcagaacatatcaggcgcagatcgtttggattggcagaaggaaaaaggatgcagccattcaaagcaagctggacagacttgcacgtctagggccagccccgtattacattcaagcagatgcggctaaccgagaggaattagaacgcgcgtatgaaacaatgaaacaaacgcatcatgaaatcaacggcatcatccattctgcgattgtcttacaagaccgaagcctgatgaatatgagtgaggaatgtttcagaaacgttcttgctgcaaaggttgatgtaagcgtgcgaatggcccaagttttccggcatgaaccactggattttgttttgtttttctcttccgtacaatcgtttgcaagagcttccggacaaagcaattacgctgcgggctgcagttttaaggatgcttttgcacagcggctgtctcaagtatggccttgtacagtagccgtgatgaattggagttattggggaagcattggtgttgtttcatcaccggattaccaaaagagaatggctcaggcaggcataggctcaattgaagcccctgaagcaatggaagctttggaattgctgctcgggggaccgctgaagcagctagtaatgatgaaaatggcaaacgaaacgaatgatgaagcggaacagacagaagaaacgattgaagtgtacccggaaactcacggctccgccatgcaaaagctgcgaagctatcacccgggtgacagcacaaagattcaacaactgttataggaggagaagcgccaatgctgaacacagaagacattctctgtaaaatgcttttcgcacaattacagtccatagggtttttcacagaaagtaaatcccagccggtattggagaatttctatggcagatggtttgaagaaagccaatcgattttagaacggcatcaatttctcaagcgaacggagaacggacatgttccaacacgctcaataggcaccatgagcgagctgtggaaagaatggaatgaacaaaaatctgacctgcttcaagacaataatatgaaagccatggtgacattggtggagacagcacttaaagccttgccggagattctgaccggcaaggcgtcagccaccgatatcctgtttccgaattcatctatggatttagtagaaggggtctataaaaacaatcaagtcgcagactattttaatgatgtgcttgcagatacgttaacagcctatctgcaagaacgtctgaagcaagagcctgaggcgaagattcgaatattagaaatcggagctgggaccggcgggacaagcgcggctgtttttcaaaaattgaaagcatggcagacacatataaaagaatattgttatacagatctgtctaaagcttttctaatgcatgcagaaaataagtatggtcctgacaatccatatttgacatataaacggtttaatgtcgaggagccggcgtctgaacagcatattgatgcgggaggctacgacgcggtcatcgcggcaaatgtgcttcatgccacaaaaaatatccggcagacattgcgaaatgcgaaagcagttttgaaaaagaacgggctgctccttttaaatgaaataagtaatcataatatatattcgcatttgacgttcggccttttagagggctggtggctgtatgaggaccctgatctccgcataccgggctgtccgggcctgtatccggatacttggaaaacggtgcttgagagtgaaggatttcgctatgtttcctttatggctgaacaatcgcatcagctcggccagcagatcattgccgctgaaagtaacggagtcgtccgtcaaaagaagagaacgggggcagaagaagatccaagccatatacaaatgaatgctgaaatcgctcattcacaggaaagcgattctctcatcgaacaaacggcacaatttgtgaagcatacgctggcaaaatcaatcaaactatcaccagaacgtattcacgaagatacgacatttgagaagtatggaattgattcaattttacaggtgaatttcattcgtgaattagaaaaagtgacgggagagcttccaaaaaccattttatttgaacataacaacacaaaagaactcgtcgaatatttagtaaaggggcatgaaaataagctccggacagcattgttaaaggaaaaaccgaagcctgcaaaaaatgaagctcctcttcaaacagagcgtacagatcctaataagccatttacttttcatacacgccgctttgttacagagcaggaagtcacggaaactcagctagcaaataccgaaccactaaaaaaagaaaagacaagtaatttgcaaggaacacattttaatgattctagtacagaagatatcgcaataatcggggtaagcgggcgctatccgatgtctaacagtttagaagagctttgggggcatttaatcgccggagacaattgtattacagaggcaccggaatccagatggcgcacatctttattgaaaacattatcaaaagatccaaaaaagccggcaaataagaaacgctatggcggatttttacaagatatagaggcatttgaccatcagctttttgaggtggaggaaaatcgggtgatggaaatgacaccggaactccgtttatgtttagaaaccgtctgggaaacgtttgaggacggcggctatacgcgaacccggctggataaattgcgggatgatgacggagtaggtgtttttatagggaatatgtataaccagtatttttggaatatcccatctttagagcaggcagtcctcagctcaaatgggggagactggcacattgcaaatcgcgtttcccacttttttaacctgaccggaccgagtatcgctgtcagctcagcatgctctagttcattaaacgccatacatcttgcgtgtgaaagcctgaaattgaaaaactgctcaatggcgattgctggaggcgtcaatttaacactcgatctctctaaatatgattctttggagcgtgccaatctgctgggaagcggcaatcaaagcaaaagttttggcacaggaaacgggcttattcccggggaaggcattggagctgtcctgttaaaaccactttcgaaggcgatggaagatcaggatcatatttacgctgtgatcaaaagcagttttgccaaccatagcggcggaagacagatgtatacagctccggacccgaagcagcaagcaaagttaattgtcaagtcgattcagcagtcgggcattgatccagagactatcggctatattgaatcggcggcaaatggttcggcgctgggcgatcctattgaagtaattgccttaacaaacgcgtttcaacaatatacaaacaagaaacagttttgtgcgataggctctgtcaaatccaatctggggcatttagaggcggcttccggcatttctcagctgacaaaagtgctgctgcagatgaagaaagggaccctggtgccgacaattaacgcgctgcctgtcaatccaaatattaagctggagcacacggctttctatcttcaggaacaaacaaagccatggcatcgcttgaatgatcctgaaactggaaaacaattgcctcgcagaagcatgatcaattccttcggagcggggggagcctatgccaatcttattatagaagaatatatggagacggcccctgagaaagaacatatcgctctccgccagcaggaattcactgccgttttttcagccaaaacaaaatggagcctgcttagctatctagaaaatatgcaattgtttttagagaaggaagcttctctggatattgaacccgttgtacaggctttacacaggagaaaccataatttagagcatagggctgcatttacagtgacatcaactcaagagctgatcgaaaaactaaaggtgttccgaacatcaagagaaagctcactccagcaaggcatctatacatcattcgatttacagccatgtccggaatcagcatctaaggatagagaaataaacgcagcagagcaatgggcacaaggggcatcgattgcttttaaagaagctgatatagggaaccgaacaggctgggttcatctgcctcactatgcatttgaccataatacatcatttcatttcgatgtatcgtctatcaatgagaaatcgtcagatgttgaagacaatatcaatcagccggtcattcaagagcaattcacttatgatgagccttacgttcaaggacacgtcttcaacaatgaacgggtgcttgtcggtgccacatatggcagtctggccattgaagcattttttaacctgttccctgaggaaaacagcggccgtatcagcaaattaagttatatcagtccaattgtcatcaaacaaggcgagaccattgaacttcaggcaaagccgctgcaaaaagatcaagtcatagaactgcaaatcatgtatcgcgagccgtcctctggtttgtggaagcctgccgcaatcggacaatgcggaatcggttcttttgagcccaaaaaagtcaatatcgagaacgttaagcattcattaactaagcttcatcacatcgatcagatgtataaaaccggaaacggtcctgaatggggagagttatttaagacaattactcatctctacagagatcacaagtctatactggcaaaaattcgcctgccccaaagcgggctggcaaacgggcaccattacactgtaagcccattgatgacaaacagcgcgtacttggctatcctcagtttcttagagcagtttgacatgacaggcggcttcctgccgtttggaatcaatgatatccagtttacaaagcaaacgataaaaggggattgctggcttttgattacattggttaagaatacaggtgacatgttgctgtttgatgtagatgtgatcaatgagtcgtcagaaacagtgctgcactactcgggctactcgcttaaacagcttcgtatttcgaatcaaagaggaaatgaaaataaggccatcaaagccagcgatctgaaagctcgtatcagaagctatgtaacagataaactggcagtaaacatggccgatccgtcaaaattgtctcttgcaaaagcgcatatcatggattttggaatcgattcttctcaattggttgcactgacaagggagatggaagcagagacaaagatcgaattaaatccgactctgttttttgagtatccgactattcaagagctaatcgacttttttgcggacaaacatgaagcatcttttgctcagctgtttggtgaagctcatcagcaggaagaacgcctagctcaaatcgaaaaccaaatgaaacagattccggcatacgagacgaacacggataaaacaatcgaacacgcggcagacggcatagccattatcggcatgtcgggacagtttccgaaagcaaacagtgtaacggaattttgggataaccttgtccaaggaaagaactgtgtctctgaagtgccgaaagaacgctgggactggcgcaaatatgccgcagccgataaggaagggcaatcaagccttcaatggggcggttttatagaaggaataggtgagtttgatcccctgttttttggcatatcgcctaaagaagcggcgaatatggacccacaggagtttctgctcttgatacatgcatggaaggcgatggaagatgcaggcttaacagggcaggttttatccagccgcccgacaggagtatttgtcgcagccggcaatacggatacagctgtggttccttccctaattccaaaccgtatatcctatgcacttgatgtaaaagggccaagtgaatattatgaagctgcctgttcctcagctctagtggctttgcacagagctatacaatccattcgaaacggcgaatgtgagcaagccattgtcggggctgtgaatttgctgctttcaccaaaaggctttattggcttcgactcaatgggctatttgagtgagaaaggacaggccaaatcctttcaagcagatgcaaatggctttgtcagaagtgaaggagcaggagttctcatcattaaaccattgcaaaaagccattgaagattctgatcatatttattcggttattaaaggttcaggtgtatcgcatggcggcaggggaatgtcacttcacgcgccaaatccggccggcatgaaggatgcaatgctgaaggcttatcaaggagcgcaaattgatcccaaaacggtgacctatatagaagcgcatgggatcgcctctccattggcagacgcgatagaaatagaggcgttaaagtcaggctgcagtcagctcgaattggaacttccacaggaagtacgggaggaagcgccatgttatatcagcagcttaaagccgagcatcggacacggtgaactcgtctcaggcatggctgctcttatgaaggtcagcatggcgatgaagcatcaaacaataccaggcatatccggattttcgtctttgaatgaccaggtgtcattaaagggcacccgtttccgagtgactgccgagaatcagcaatggagggatttaagtgacgatgcaggcaaaaaaattccgcgcagagcgagtatcaacagctatagctttggaggcgtaaatgcgcacgtcattttagaagaatatattcctttaccaaaaccaccggttagtatgagtgagaatggtgcccacattgtagttctttctgcaaagaatcaagacaggctaaaagcaattgttcaacagcagcttgactatctgaataaacaacaagaactgtcattacaagattatgcttatacactccaaaccggccgagaggaaatggaagaccgcctggcgctcgtcgtccgcagtaaagaagaactggtaatcggcttgcaagcctgcttagctgcggaaaaaggcgataagccgaagagttctgtacctgtctttagcggaaatgcagaaaatggctcgtcagatctcgaagccttgctggatggtccattaagagaaatggtgatcgagactttgttgtctgaaaacaaccttgaaaagatcgcgttttgctggacaaaaggggtgcaaatcccatgggagaagctttatcaaggaaaaggtgcccgcagaataccgttgccaacctatccatttgaaaagagaagctgctggaacggctttcaagcagtagagaatacgccttctgtttcacaggatgagcgtatcaacaacagcagcgatcatcacatattagcaaatgtactagggatggttccgggtgaactgcagcctcataagccattgcagcagtatggatttgattcaatttcttgcatacagttattacagcaattgcaatcaaaggtggaccctctcattgccttgacggagcttcaagcatgccatactgttcaggacatgatggacttgatcgcaaagaaaaaggaggatacatccttacaaaatgatcaagctcgcacgtttccggaattaataccgttaaatgacggcaagcgggggcgccctgtcttttggttccatggcggagtaggaggagttgaaatctatcagcaatttgcacaaaagagccagcgccctttttacggcattcaagccagaggattcatgactgattatgctcctttgcacggaattgaacaaatggcttcctattatatagagatcattcgatccatacagcctgaaggtccttatgatgtaggcggatattccttaggcgggatgattgcatatgaagtcacacgccagctgcaaagccaaggccttgctgtcaaaagcatggtgatgattgactccccatatcgttctgagacaaaagagaatgaggcatctatgaaaacgtcaatgctgcaaacaattaatacgatgctggcatcgattgcgaaacgggaaaagcttacggatgttctcatcagccgtgaagaggtggacataagcttagaggatgaagaattcctggctgagttgattgacttggcaaaagaacgagggctaaacaaaccagataagcaaatacgtgcgcaggctcagcaaatgatgaaaacacagcgcgcctatgatttggagtcgtacactgttaagcctctccctgatcctgagacggtaaaatgttattatttccgcaacaaaagcaggtctttctttggtgatttagacacttatttcactttatcaaatgaaaaagaaccgtttgatcaagctgcctattgggaggaatgggagcggcaaattcctcatttccacctggtggatgtcgattcaagcaaccacttcatgatattaaccgaaccgaaagcgtcaacagccatgttagaattttgcgaaaagctctattcaaacaggggagtagtgaatgcgaatttccttaaggctttccggaagaaacatgaagcgagggaagaaaaagaaacagatgaattggtgaagcgctgagaaaacacaaacgccccctcttttaaaagggggcgttttgaatgttattttgaaagtgaaacagggagactttctaatcctcttaaaaagacattttttctccattgaatgtcatcaggtgcaaccgcaagttcaatatcaggaaatctcttcaaaagtgcgttaaatgcaatgtggccttccagcctggcaagaggcgctcctaagcagaaatgaatgccaaaaccgaaagaaatatgtctgttaggcgaccggtttatatttaatatttcggggttctcaaaaaaattcgggtcgcgattggcagatccgatccctataaaaatcatgtctcctcttttgatcgaatgccccttatatgtaaagtcttcgatggcccaccgatttgccatcataacgacaggtgaggtgtatcgcagcaattcttcaaccgctgtagcgatcatttcaggctgctgcttgagcttctcacattccttcttgtgctgcagcaatgcgagggtgcctgagccgagtaagttaacagttgtttcaaggccggctacaacgagcaagaacagcatcgaatagagctctttttcgcttaacttgctgccgttttcctcagcatgcacaagtttgctgattaaatcgtcttttggctttattcttctgtcatggatcagcttggcgatataatctttaaattcacgaagagcctgatttgtcagctctctattaccttcagaggtatcaaccatcgcattggtccagatttgaaactgtgaccgatcttcttttgggattcccatcaattcagatataacaataaaaggcaaaggggaagcgaaggatttcatgatatccgctttattttctttttccatttcatctaaaagctgttcagcaatttgttcaatgctgccgcgcagattttcaatggttcggggagtaaatgcttgatgaacaagtgatctcaggcgggtatggtcaggtgtgtcttttgccagcatatgatcggatacaaaatcgatatcttcactaacgttgagcattttgatttgttcttggttcatcacattttttacgtctcttgtaattcgattgtcttttaaaaaggccatacaatcatcgtatcgggtaattaaccaggccggatatgtggctccgaaccgttttaattcaaatcggtgaatgggctcttcctctctaaatcgtcctaaaactgaaaaaggattgtgatgaaactctttaccatgcggatgaaacatcaatttttccatttgcattctcctcgcctaatagggtaaatagatgaatcaaattgctgaattagtttacaaaaaacagaatgatttgaaatgtaatcctgtctctaaaactatatatctatcttaggcgtcattcaatagggagaagaacgaaaaaagtgaaaaaacggctcgatataaagcagcgcctttgaacgaaagctcaaaggcgctacgctgtattattttgatgaaagtggctgtcagctgtgctggatatcaattgtatatactgcacgatctgttacgaccttcaatccttcgttttcttggtgaatatgaagctcacctaataaaggaatctcataggcattttgcggaagcggtacgtttccgtcctcagtgaatgttgttccttcgccttctaaaacaagctcttctttcgcaacataatcatcaggatgattcgtactgcgtatagccactttttgaaggtggagaacaatctgatccaagtctgatatctcttcatcatgggtcaattcaccttttctaatatcaagcgtctggccgacttttgattccagccattgagaaagctgtgtattcgtgtgtgccatcaatattcctccttttgatctacacgatactattcccaattgctgcatcttttacacgggaaagagccgccccactctttatgtatgaaacagttcgctgttgagtgccttgatatagcgtacggcagaacgctggaccgattcgtcggcattttctttgacaactttagagaaagcattgtaaagccggttgaattgaagcggttttactttggctgctatttcttcaactttggaggcgggaaggggaatgagatttgggtagctgtacataaagctgacccagtttcgatccgccgcaaccgtaatgatatctccggtcaatagacagcctttcccttcattgcccttgctccaatgcaaaacagcaccgcctttaaaatgtccgcccagtcggtaaaggtccagtcccggcttcatattgagcgtttcccctgaccagaagtgaatgtgattgcttggccttgtcacccattctttatcatcctcatggatatagatcggcgcctgaaacgcttcagcccactcaacctgagtagagtaataatgtggatgagacaaggcgatggcttgaataccgcctaattcgttgatttggtcaattgtcttttggtcaagatatgtcatgcaatcccacagcacattgaagcccttatgctggataagatgggctgtttgtccgatcgcaaactctggttcagttttgatgctgtaaagatgctcttcttcctttttaaggatgttttgaaggtttcctttctcacgcatgtcttcaagggttgtccaagtttgtccatcgggatgaatatactgtctttcatcctcgcaaatcagacacgagttgggcggatctactgtctgtgcatgttgcacaccgcatgtgttgcagatataataaggcactttcttcacttccttcatctattttccattattttaccttatgattatgaatattcaaacaaaaggccggcagttctgctgagagagaattgccggcttttgatgatgtttattggccgggaacggaattttctgcgttgacagcgcccgctccgtagatattcggatcttcatctttccatttgtccgtgccgtttttcaaaagctcttttacttcatcaggggtaagatccgggttttgctgaagaattaaagctgcgattcctgcgcaaatcggtgttgccatcgaggttcctgacattgtaaagtactgagaccctacacggcttgacttttggagcttatcaatataagaattcggagagcgaagggaaataatattaacacccggcgctaaaatatcaggcttttctttcccatatactgtcgggccgcggcttgagaaggaagcgacagtatcatcatcgctgcttgcagtattgttatcgtcaagcgcacctactgtaatcaccttttcgctcacgcccgggcttgcaatggtctgcgaatcagggcctgagtttccggcagcgacacagacgacaatccctgcgctccacgcttcctcaaccgctctgactaacggatcttcctgttcatgatcatatctaagggcatcgcccccgagcgacatgctaataatatcaatcggttcatcggggttgtcctcattgtattgaatacaccactcaacaccctctataatatctgctaacgttcctgaaccctgcttgtttaatacctttacgccaatgagattggcttccggtgcagggccgcggtattgaccggaagaggatgcgccgctgcttgcgacatcacctgcacagtgtgtgccatgaccattatcatcgtacggctctgttttttgattgaccatgtccgcgaatccgataattctgccttctagatcaggatgcgggtagattcctgtatcgacaacagcgacagtaacaccttttcctgtcagggtttgaccgtttctgacgacttccttcgcatggcttgcttcggttgccgtgtctaaaagcgctttgacttcgcggtttaaatacactttacggatattgctgcattcagagagaagggaatgtaatgctgaaggagtaacttcggcgctgcagcagttgattttgttgaagcggctttttagcttgctgcgtttttctttttgcagcacctctccagctatttgaaggccggtctcgtgacagccttcctcaaattcgataatgactgacattttttttctgttttgcaatttggtttcgaaaaatttatgcaagaagcaaggagtccatttgaagggcttgtaaagctgcaatacggtttcccgtaacggccaatctagcttgtgagcatttgctctcaccatttgtaccatagagtacccaaacatgtattttcctcctattataaggttctctgtatactctatgaacagatgataggtttggtaagtttgtttgtcctctgtaagagacagacaagagtttgtttttctgaatctttcgcattagatacgatagattcagaagctgaggaaatcattggggattgaaaaagaacgtttgttcgtattataatgtgatcatatcaaactgggaaggggagagcaaccgtatgaatttctacttgcaccgatctttggaaagccaaatgccaatcagcattatatatatgaagaaagacggaacgattagtaaaagaacgattattgtgagacagaaaagcaaaacgaaaatcaaagcattttgtttttcgaaacaacaaatcagaacatttttattggactctatcctctcctgtgactttgtgagaacaaataagcaaaatctctattctgcaggccggtaacagctgtccgtctcagcaaccgggcagcctgttactaaaaccctccttaaacctatatacatttatttgccaagtgaggttgttcctaccttttttgtctttcctctcaaccttttttcactcttatttgaaatgaaccgctaataaccgtgacaatcaattgattttttgaaaccgggaactttttcactgatgatattgtgtatacaatggtaagataaaacctattggctaaacctcatataatgaaccgcgccattcttatgaaaggagttaaacatgagaagatttttactaaatgtcatattagtcttagccattgtcttgttcttgagatatgttcattactcattggaaccagaaccatcaaatcagccagatacatattcaaatttcagcagcttggcagagaatgagagcccagccgattacgatatttcatataatgagaaaaaaggaagcaaagtcttaattatgtctccgcatggcggaagaattgaaggcggagtaagtgagcttgtgcgttatttcaataatgaatactctacatacctatttgaagggttgaagtcccatgataaccaaacactgcacattacaagcaccaactttgatgagccattggcaaaaaagaaaatcaaggagcatcaatatgtggtggcttttcacggatataaaggagagaacaagaatacccttgtagggggaacagaccgaaagcgggcgaaaatgattgtgagagcccttgagcggagagggttttccgctgagttagcgtcgtctaaaagcggtcttgctggattgaatgccgaaaacattaataaccaaggggaaacggggctaagtatccagctggaaatcagccgtgagcagagagaagcattttttgatgatttttattataaaaatagaaaatacacaaagaacagtgaattttatgcttatgtcagtgcgatcaaaggtgtcctggaaaaagagtattcgtaacaagcagatcagaagacaaaataagagaagatcagtagactgaaataggataaaaaaggaggcaaaacaatggcagatcatcatttttatttaaaagcgaactggccgggtaaccgtaatgatgtcggtacgatcgaaagcggaaacctgatcacatcgatttccattcctaaagaaatggatggcccgggagaagggaccaacccagatgaaatgcttctcggggcggcagcgacctgttacattattacacttgcagcgatgatggagagaagcgggctggaaaaagaagacttacagatggagtcagaaggcattgtcaacgttacaaaaggagtctttacatacaaaaagatcattcaccgtccctctgtcgtgcttaaacatgatgcttcacaagacgacgtcgcattggcgcacaaactttgtaaaaaagcggagtcgtcatgcatgatttcgcgtgcaattcaaggaaatgtcgagctgcagcttgaagcctctgtgaaactgggttgagaataaagaaaacagacggtcactcacaggccgtctgttttttatcttcagcgtgggctttcgattgatttagcacgaccacgcctgcaatgacaagcgtgagaccgaatacaccttttaaactgatggtttcgccaaaaagcaaaaacccgacaattgctgtaagcgcggtaccaacgcccgaccatgttgcatacgcgcttgataagtcaattgtttttaaagaaaagcttagaaacgtaaaagcagaaagaaatccgactatgactccggcaatgggccaggcttgtgtaaatccttctgaaagcttcaacatcgtgctcccaaacacttcagatacaatggcgagagccaaataaagcaatcctctcatcttcatcactcctttacggccaattaagtaacacgacccctgatagtaataaaagaatcccgataagccctttggcattcagatcttccttgaaccattttactccgatcactgtcgtcagcaccgtgcctgccccgctccaagtcgcataggagaggctcaggggaatatggtttaaagtcagggacagcatataaaaggcgagggaatagccaataacgaccaaagcacttggcttccactttttgaagccatcagatactttcagcatggctgctcctatcgattccgaacatatggcaatcgtgaggaatatatatcctatcaacatcatgaattctcctcactatatttttagattagaaaaaaacttcagctagaaaaatattagtgtatgcctatgtatgagtcaagagattcattttcacacacttaaaaagacccctttttaaggggccttttgcgtttaataataataagggaacggggcatacggataataggggtatccgccatacaaataaggattaaataaagcgcttcctataagcccgcctgcaaggccgccgataaacggtcctccaaaaaatccgaatggccggccaaacccataaccaaatccgggtcttccaaatccgtaaccgaacccgaacggtcttccaaacccaaatggtctcccgaatccgaacggtcttccaaatattcttgtatcttcagggctgaaatgctctaactcgttcatgttttctttcctcctgtaataaagtgtagatgatgcagtgtattcaccctgcccggatttgattgggcgaatcgaggaaaaggaggatgtgaacacattgggcctgtatcagtctgactggtcaaaagcaccgccccacgcacatgcctatcatgtcaaaacaacgagagaacagggccattatcatctcattgaagggtttactcagccggcaaacggatcaaataccgatcagcatacacattactatacagggatcacttcatttgaaaacggccattttcatcggtattacggaatctcagggccggcgattcccttagcagatggcacacattatcatgaaatcgaagaaacgacatatctggcctataacgagccaattgagatccagtacggaggggttgtgtacgatcccggagatgacagaagaaaaacgcatcgtcataccctgaaaggaaagacaagggaaattgtcggcaatgagccgctcggctggtagaaggatgtttaccgatgcaaaaaaagggcaaaatggataggtggttgtccatgttgaatgctataatgggggggagatttataaaagagagtgatacatattgaataatacgaagcagcccgttgtcattttagtcggaccgacggcagtggggaaaaccaatttaagtattcaactagccaaatccttaaacgcggaaattatcagcggagattcgatgcagatttataaagggatggatattggaacagctaaaattaccgaacaggagatggagggagtgccccatcatctgattgacattttagatcccaaagactctttctctactgccgattatcaaagcttagtaagaaataaaatcagcgagattgcaaatagaggaaagcttccgatgattgtcggcggtacagggctttatatacaatctgtgctttacgattatacatttacggaagaggcaaatgatcccgtgtttcgagagagcatgcaaatggccgctgagcgggaaggcgctgactttctgcatgccaaacttgctgcagcagatcccgaggcagcagctgcgattcatccgaataatacaagaagagtcattcgcgcactggaaattttacatacgtccggaaaaacgatgtcccagcatttgaaggaacaaaaacgagaacttctgtacaatgcagtgttaattggcttgacaatggatagagacacgctttacgaaagaattaatcagcgggtcgatttgatgatggagtcaggccttcttccggaagtgaaacgcttatacgacaagaacgtgagagactgtcaatcaatacaggcgataggctataaagagctgtatgcatattttgacggttttgtgacactttccgatgctgtcgaacagctaaagcagaactcgaggcggtatgcgaaacgccagctgacgtggtttcgcaacaaaatgcaggtcacatggttcgatatgacaccgcctgttgatatggagctgaaaaaaaaggaaattttcacacatatagcaggaaaactcgaactttaatcgaaactgtatgatatagagaatcaaggaggacgaaacatgaaaccgattaatattcaggatcagtttttgaatcaaatccggaaagaaaatacgtatgtcactgtttttttgctgaacggctttcagttgcggggccaggtgaaaggctttgataactttaccgtattgttggaatcggaaggtaagcagcagcttatatataaacatgcgatctcaacgtttgcgccgcaaaaaaacgtccagcttgaactcgaatagatcaaaaaatgccatgtcaagacatgaggaaaggctgccgggggttcccggcggccatttttaacatgaatccacttttgctccaagctttttgtgtaagctgaccatgccaaggcacggtctttttttatgagaacaacatacggaagtgaaaatggtatattatgtataaaatgaatttgggagtgatcgaccttgtttgaaagtgaagcagaactgagacgaatcaggattgcacttgtatggatagctgtctttttactgttcggggcgtgcgggaatcaagataccattattgaaacagacagcggcaattcagactatgaaacgcctcagcccacctcgtttccacttgaacataaccattttggcgttatggaggacggctatatcaaaatttatgagtataatgagtcccgcaatgaggtaaagctgaagaaagaatacgcggatgatgagcttgaataaaattcacaagcattcgaatttacaaagcggattccagccgctaaactaaatacagacacagatcaaacagagggtgaaaacatgaagcataaagtgatcgtgaatcattgggaagaaatttgcgaagatgattcttgctatgaatacggaacaagtatcattgtgaacggaaaagaattaatcagagaagcgtcaattatcactgctttgaaggcggttttagaagagatcggcgcggatgttgaaatagaagaaacagtagagagcgaaaaatgctgtgatagcttaagaaaaaaaaatctagactactaagcagttttttttcatgttatgataaacatcggctaaaaaacgacaccccgagtaggatgagagatgattctcgttctgctctcttttttgggccctaatgagtctgcccatttgcctgatttgatcaaaatatgaatttttcataaaaacgaatctatatattgtgtttttgctagagggtagtatactgtatatagtgttagtgatgagagattcatattttttgataggtcgtgataaaacgtggtacaaatcatatttgattcgaaaacagggaatgttcagcggtttgtgaataaaacaggctttcagcagatacgcaaggtggacgaaatggaccacgtggacactccgtttgttttggtcacctacacgacaaacttcggccaggtaccggcatcaacacaatcatttctcgaaaaatacgcccatctcttattaggagtcgctgcgagcggcaacaaagtatggggcgataactttgcaaaaagcgccgataccatttcaagacaatatcaggtgccgatcttgcacaaatttgaactcagcggcacatctaaagacgttgaattgtttactcaggaggtagaaagagttgtcacaaaatcaagtgccaaaatggatccagttaaataacgaaatcatgatccaaaaagatggaaaattccagtttgataaggataaagaggctgtacatagctattttgtagattatatcaatcaaaacacagtcttctttcacgatttaaaagagaagctggattatttggttgaaaaccaatactacgaagaggaattcttaagcctttattcttttgaagacattaaagaagtgtttaagacagcttacgctaagaagtttcgttttccttccttcatgagtgcgtttaaattctataatgactatgctttgaaaacgaatgacaagaaaaaaatcctcgagcgttatgaggaccggatctcaattgttgcgctgttcttcgctaacggcgacactgagaaagcaaaagaatatgtaaacctgatgatcaatcaagaatatcagccgagcacaccgacatttctgaacgccggcagaaaacgccgcggtgaacttgtgagctgcttcttgctggaagtcaatgattccttaaatgacatttcaagagcgatcgatatctccatgcagctttctaagcttggcggcggggtttctcttaacctgtccaagcttcgcgcgaaaggtgaagccattaaagatgttgaaaatgctacaaaaggcgttgtaggcgtcatgaagcttcttgataacgcgttccgttatgctgaccaaatgggacaaagacaaggctctggcgcggcgtacttaaatattttccaccgcgatatcaatgattttctcgatacgaaaaagatttcagcggatgaagatgtgcgcgtcaaaacgctttcgatcggtgttgtcattccggataagttcgttgagcttgcacgcgaggacaaagcggcttatgtattctatccgcacacgatttataaagagtacggccagcacatggatgagatggacatgaacgaaatgtacgacaaatttgtcgacaaccctcgggtgaaaaaggaaaaaatcaacccgcggaaattgcttgaaaaactggcgatgcttcgttctgaatcaggctatccatacatcatgttccaagataacgtgaataaagtgcatgcgaataaccatatttccaaggtgaaattttctaacctttgctctgaagtgctgcaggcatctcaagtttcttcatacacagactatgatgaagaagatgaaatcggtctggatatttcctgcaacctgggttcgcttaacattctcaatgtcatggagcataaatcaatcgaaaagacagtcaagcttgcgacagactctttaacacacgtgtctgaaacaactgacatccgtaatgcgcctgctgtaagacgggcaaacaaagcgatgaaatcaatcggcctcggtgctatgaaccttcacggctaccttgcgcaaaacggcattgcgtatgaaagtccggaagcgcgtgactttgcaaacacgttctttatgatggtgaacttctactccatccagcgttctgcggaaatcgcaaaagagaagggtgaaacgtttgatcaatatgaaggctcaacctatgcgacaggtgaatactttgacaaatacgtttctactgatttctcaccgaaatatgaaaaaatcgctaatctgtttgagggtatgcatatcccgacgacagaggactggaaaaagctaaaagcatttgtggctgaacacggtatgtatcacagctacagattatgcattgcgccgacaggctctatctcatacgtccaatcaagtacggcgtctgttatgccgattatggaacgcattgaagaacgaacatacggcaactcaaaaacgtactacccaatgcctgggcttgcatctaataactggttcttctataaagaagcctacgatatggacatgttcaaggttgtggatatgatcgccactatccagcagcacattgatcagggaatcagctttacattgttcttaaaagacacaatgacgacccgtgatttaaaccgaatcgatctgtatgcacatcatagaggtattaaaaccatttactatgcaagaacgaaagatactgggcaagacagctgcctttcttgtgttgtttgattaaaggagagtttatagtgacaaaaatttatgacgcagcaaactggtcaaagcatgaagacgattttacccaaatgttctataaccaaaacgtgaaacagttctggcttccggaagagattgctttaaacggcgatctcctcacatggaagtacctcggaaaaaatgagcaggacacttatatgaaggtactggccggacttacgcttcttgacacagagcaggggaatacggggatgccgatcgtggctgaacacgtagacggccaccagcggaaagcggtgctgaactttatggcgatgatggagaacgctgtccatgcgaagtcgtactctaatattttcatgacccttgcaccgactgaaacgattaatgaagtatttgaatgggttaaacaaaataaatatttgcagaaaaaagcgcaaatgattgtcgggctttacaaagccattcaaaaagatgatgaaatttcactgttcaaagcgatggttgcttccgtctatctggaaagtttccttttctacagcggtttctattatccgttatatttctacggacaaggaaaactgatgcaaagcggtgagatcattaacctgatccttcgtgacgaagcgattcacggcgtgtatgtcggtctccttgctcaggaaatttataataaacagacagaagagaaaaaagcagagcttcgtgaatttgcgatcgaccttctgaatcagttatatgaaaatgagcttgagtatacagaggacttgtacgatcaagtcggactctcacacgatgtaaagaaattcatccgctataatgcgaataaagcgctgatgaatcttggatttgatccatacttcgaagaggaagatattaatccgatcgttttaaacggattaaacacaaaaacaaaatcacatgacttcttctctatgaaggggaatggttataaaaaagcgacagttgagccgctcaaagatgatgacttttattttgaagatgaaaaagagcagatataatatctgctcttttcggcttgaaggttcaaatgaggaggacgcagtacccatgggaaaaatggacgaaatgattttagttgccccacgcgatgatgtgtttaaaaaagaaagcttaaccttccagggcgtgtacagtgaagatagcagagtagccgaaatcatggctcagattgaagcggcctatcgtgaaatgagaagaggggacgcagaagaagatccgcgtttcaagcagccgataccttatgtcgtcattaagcgtgaagatgaagtttttctttacgagcggctggctggcggcggtgaatcacgactgcacaacaagctttctctcggctttggcggtcatatgaacgccatcgaaggggcagcttcatttgctgaagtcttaaagctgaacacagaccgtgagcttgaggaagaactgcaaataaatgaagaagataaacaggcgattgtcacactgggattgatcaatgatgatgaaaatagtgttggcaaagtgcatatcggtattctttctgcgcttcaattaaagcctggcgcacaagtggaagtgaaggagaaagaacaaattgcgggtaaatggatgaaagtttctgaattaaaacaggatgacatctacaaccgtctggaaacatggtcacagtttgttgttgatattcttgaataaaaaaacccggtttctcgcgatgaggagccgggtttttttatgagacgctcgtccccgtctcggctatgattctaggatcacaatagcgtcaaagccggcatttttcgctctggcagcgagagtgtctgcattgtcattggatgaaaatgcgccaatctgcactttgtaaaatccgtcctttaaaaggacaatcgagtcaaaacctttggcttcggcattacttgcgagcgagtcggcattcgctttggctttaaatgcgccgatttgaaccttatataaccctgagctggaagtctttttaaggttaaaggcttgctccagcccgtttgcatgtcctctcgctaagctttgaataaaactgctcgttttcagcttatttgcatcggaaacggtatcaatgaagccgttctcggtcaagagggcaggcattgccgactcccttaggacgtggaagttcgctgtttttttgccgcgatcggcaaagtcgacagcttgtatcacttcagagtgaattgccgattgataagtcgtcgtcggggctcctacatctggataaatatagctttcaaaacctgtgcctcccccggaattaacgtgaatggacaaaaagaaatctgctccccagttatttgcggcatttgtccggtcgtttaagctgacatattggtcgcttgtccggctcagcagcagagaaacgccttcatattcattagttaatatcgtacgtaaggctaaagcgatttgcagggttaacgttttttcctgaaggccattacctgttgcgcctggatcagacccgccatggccaggatcaataaaaattttaaccatttttcatcacctcattacaggatatgaaaaaacacagcttctgcttgtacgattatcattcaactgaaaaatgaggaaataaccctttcacatccagaaattatttctcgggaaagcgcacaattcaacatgaagcgacaacagatacggtccgacatgaaatctgtgcatacgccatatgtttgtatgtactttgagttcggttaacctgcactgattcctgttggttttaagctttgcgttcatattaaatcaagcatttgaaacgtaaattgatgagaaaagctcctttcattaaagacaccactttataaatcgaaaaaaagaaaaacacttcaggtatcttagggcgggtaatacgcttcgtacaaaaaacagcccgttgcatgaaaaaaggattggcgaatggagaaaataatgagaaagaagctcactataatactttgacaaaatgattaaaaacaaaatctcatggtttgtccaccccatgtccgtgaatacaataagaaataaagtatttctcgggaaagcgcaggattccttattgttcccgaaaaaagcaattgtttcgacacatgataggcgtttgtcacaatcggcatccgcttgaatatcatatagagagaacagagaggtgaagatgttggagcgcgctgtgacttataaaaacaacggacagatcaacattattctgaacgggcaaaagcaggtgctgacgaatgctgaggcagaggcggaatatcaggctgcattgcaaaaaaacgaagcaaagcacggcattttgaaggaaatcgaaaaagagatgagcgcattagttgggatggaggaaatgaaacgcaacatcaaggaaatatacgcctggatttttgtgaaccaaaaacgcgcggagcaaggcttgaaggttggaaagcaagcgctgcacatgatgtttaaaggaaatccgggaacgggaaaaacgacggttgcacggctcatcggcaagctgttctttgaaatgaatgtcctgtcaaaaggccacttaatagaagcggagcgggctgacctggtcggggagtatatcggacacaccgcccaaaagacgagagatttaatcaaaaagtcattaggtggcattttgtttatagacgaagcctactcgctggcaagaggcggcgaaaaggactttgggaaagaagcgatcgacacacttgtaaagcatatggaagacaaacagcatgagtttattttgatactcgctggatattcacgggaaatggatcattttctctcgttaaatcccggtctccattcaagatttcccatctccattgattttccggattactctgtgacccagctcatggagattgcgaaacgaatgatcgatgaaagggaataccagctcagtcaagaagcggaatggaaattgaaagattacttaatgacagtgaaaagcacgacaagccccattaaattcagcaatggacgttttgtcagaaatgtgatcgaaaaatcgatcagagcacaagccatgaggcttttaatgggagaccaatacttaaaaagcgacttgatgaccatcaaaagccaagatctttccattaaagaagaagcatctggatctgcatagacctctcagtttttgagaggtctgttttttgctcgtatttccgcttttcaaagcaatcgatttgtggtatacacatgcagggtttggtatgataatactactgcccaatatgcaaaagaaaggaacatccatttgaacgaacaagaaacgattcaggagaaagccattttagtcggatgtcagctgccgcatatcacggatgagcattttgaaaattctatggaagagctagcatctctgacgaaaacagcagacggaaaagtactgaccagcgtcacacaaaaacggaacagggctgacgccgctacatatataggaaaagggaaggtagaagagctgaaggcactggtggaagagcttgaagctgatctcctcatctttaatgatgaactgtcgccaagtcagctgaagtcattggcaacagcaattgaagtgaagatgattgaccgcacgcaattgatattagatatttttgcaaagcgggcgagaacgagagaaggcaaacttcaaattgagctggctcagctgcaatatgcactgccgcgtctgacgggacaagggatcaacctttcccggcaaggcggaggaattggggcaagaggtcccggggaaacgaaactggaaaccgaccgccgccatatcagaaatcgcattcatgaaatcaacacacagctttccactgtcattcgccatagaagccgataccgtgaaagaagaaagaaaaacggtgtgcttcaaattgcgcttgtcggctatacaaacgcagggaaatcaacatggttcaaccgcctgacgagtgctgacagctatgaagaagacctcctgtttgccacgctcgatccaatgaccagaaaaatggtcctgccaagcggctacagtgttcttctttcagatacagtaggatttattcaggatcttccgacgacattgattgctgcattccgctcaacgcttgaggaagtaaaagaagcggatttgatcctgcatttaattgattcttcaaatgaggattatgcgggacatgaaaaaacagtgcttgggcttctcgaggagcttgaagcagatgatatcccgatgctgacggcttacaataaacgtgatcaaaaactgcctgattttataccgtccgccggaagggatcacattatggtcagtgcgaaatttgaggacgacgctgcagcctttaaagaagcgattcagcgctatttgcgccaagaactgttaacgtcttttgaagcacatgtgccggcaagtgaagggaagctcctttccagaatcaaatcggaaacgatgatagaccgcttctattttaatgaagaaaatgaacagtatgacatatccggctatgtccaagaagagcaaagtatcatcggtgaattaaagaagtatatgtaggaaggaaaaataaagacatgtttgacacattaacacacggagaattattgaagaaaacggcaatggaagtggaagcggacattgccggcattcataaacaaatagaagaaatcagcgagcgaaatgagtggagagtgcttcaaagctatagaaaacacaaagtaagcgacactcatttcacgccgtctactggatacggctatgatgatatcggaagagacacgcttgaaagcatatatgcggatgtgtttggcggagaagcggggcttgtaaggccgcaaatcatttcaggcacacatgccatctcaattgctttgttcggtgtcctcagaccgggggacgagctcctttatatcacgggcaagccgtatgatacgctagaggaaattgtgggcgtcaggggtggagaaaacgctggttcgttaaaggattttcaaatcggctataatgcggttgatctgacgaaagacggaaagatagactatgatgcagtcgccgctgcgatcaatccgaagacaaaagtaatcggcattcagcgctcaaaaggatatgcgaatcgcccttctttcttaattagtgaaataaaagaaatgatccgttttgtaaaagaaatcaatgaaaatctgatcgtctttgtggacaactgttacggagaatttgtggaagagcttgagccttgccatgtcggagccgacctgatggcgggatctctcattaaaaatcccggcggcggccttgcgaaaacaggcggctacctcgtcggaaaagcgaaatggattgaagcttgctcataccgtatgacgtcacccggcatcggcagagaagcgggggcatctctttactcgctccaagaaatgtaccaaggcttctttttggcgcctcatgttgtgtctcaaagtctaaagggagcggtgtttacagcgagattccttgaaaaactcggcttcacttcaaacccgaaatgggatgcgaaaagaacggatttaatacaatccgttgagttttctgacagagaaaagatgattgctttttgccaggctattcaatttgcatcgccaatcaatgctcatgtgacgccttatccagcctacatgcctggatacgaggatgatgtcattatggcagcaggcacgtttattcaaggagcaagcatcgaattatcagctgatggccctatccgcccgccgtatgtagcgtatgttcagggaggattaacctattcgcatgtgaagaatgccatatgcagtgcagtggattcattgatggaaaagcaattaatttaaatttttaaaaatttctctggatttgatgttaagaatccttacatcgtattgacacataatataacatcacctataatgaaactaagttaagaaaaggaggaaattgagatgagtgataatattcgccgctcaatgcctttatttccaataggaattgtcatgcagttaactgagttatcagcaagacaaattcgatattatgaggaaaatggactgatatttccagccagaagtgaagggaatagacgattattttcatttcatgatgtagataaactgttagaaatcaagcacctgatagaacaaggtgtaaacatggcaggaattaaacaaattctggcgaaagccgaagccgagccagcacaaaaacaaaacgagaagacgaaaaaaccaatgaaacatgatctgtccgatgacgaactgagacagctcctgaaaaacgagctcatgcaagccggccgttttcaaagagggaatacattccgtcaaggcgacatgtcccgcttctttcattaatccgttagcaactgttttgctatatacatttaccttttaagaggaggaattttaccaaatggcaaagtacactagagaagatatcgaaaaattagtaaaagaagaaaacgtgaagtatatccgccttcaatttactgacattcttggaacaatcaagaatgttgagattcctgtaagccagcttggaaaagcgcttgataataaagtcatgtttgacggttcttctattgagggattcgttcgtatcgaggagtcagacatgtacctgtatccagatctaaatacatttgttatcttcccatggacagctgaaaaaggtaaagtagcacgtttcatctgtgatatttacaatccggatggcacaccttttgaaggtgacccgcgaaacaacttaaaacggattttgaaagaaatggaagacctcggatttagtgattttaaccttgggcctgagcctgaattcttcttattcaaattggacgaaaaaggcgagccgacgcttgaactaaacgacaaaggcgggtatttcgacttagctccaactgatttaggagaaaactgccgccgcgatatcgtgcttgagcttgaagagatgggctttgaaatcgaagcatctcaccacgaagtagcacctggtcagcacgaaattgactttaaatatgctggagcagtccgctcttgtgatgacatccaaacatttaaactagttgtcaaaacaattgcccgcaaacacggcctgcatgcgacatttatgccaaaaccattgttcggcgtgaacggttctggtatgcactgcaatctatcactcttcaaaaatggtgttaacgcattctttgatgaaagcgcagatcttcagttaagtgaaacagcgaaacacttcatcgcaggtatcgtgaagcacgcaacaagctttacagcagtaacaaacccgacagtaaactcttacaaacgtcttgttcctggctatgaagcaccttgctatgtagcatggagcgcgcaaaacagaagcccgcttatccgtatcccggcttctcgcggcatcagcacacgtgttgaagtacgcagcgtagacccagctgcaaacccataccttgcacttagcgtattgcttgctgcaggattagacggaatcaaaaacaaactggaagcgccggctccaatcgaccgcaacatctatgtgatgagcaaagaagagcgcatggaaaacggaatcgttgaccttccagcaacacttgcggaagcgctagaagaattcaaatcaaacgaagttatggtcaaagcgctgggcgagcacctattcgaacacttcatcgaagcaaaagaaatcgaatgggatatgttccgcacacaagttcatccttgggagcgcgaacagtatatgtctcagtattaatctctcaatcccttggcactaaaggtgtcaggggattttttatgttaataggtaataaattatggagcggcactgctaaaaagcagggtcacttttagtctatgtcactaataattctatgtactaaattttcaattagggaaataattccacgcttaaggaagcaatacgcataaataattcgacaaattctgtgataattccattgttcaatacttctaccagcaataataagatgagcaaggtggatgattatcattgacatcataaccaaaaaaatccataattacgttgaaatctaaatcaattttcaaaaaggagatttccatgaaaaaattgactatcttttccgggggattaggagtggttttttctgtactggctcaactgtttgcggttatagatgactcttacactttggggaatttatggtttttaggtgctttggcgggaattataaccatgcttgcttcaatccagacaaataataaaccaatcttcagcattttattaatttctagttcagtaataggtctacttggaactggttttgtatacatcataccaacactgttcaatataataataatttataaattttcaaaagtaagccaataagccaatgggaaaattaaggttctttttttatttaacatccctttgacaaggtcggtaatgaatcgcagaatgttgcaactggtccacacagttggggaaatcgtgggcatgattatcgaacgccatgtttctaggataccggaattgaaacatttgctgagtcatttcgtgaagttgatcaccaaatgtccatttcaatagaggcacgtctaaagaagctatcataggaggacaatactgtgtggaaagctttaagtcaattactcaagaaacagaaaaatcaaagtccaagcgatgagggttatatacagattccagaaaaggatataaatcaagaattaaagcaagtgatatttgagttggagagcctgggggaagtagtatcgaaaaagctgcagaataagtatgcaggtgtttttgaagctcaggataaaccaaatctcagcatcaaagtttgtagagacatagatggagatgtgctaaatgattttacagctgagagatgttttgaaaaagaataccgttcacaaatagcaattaattactatcaacctgcaatagtctgtgatgaagaattagcctgtttcacaatggatttgtggtattactacggtggatataaagggacgggttgtggaacattattcgatttaaataataatgacttagaaaaagaaattgaagagacgctaatatttttgctcaatgacaaacaattcgagaaataaaaaagaaggccgcaaagcgctttcaatcaactgatgtagctaagaaaagcgtttaagaattagctgacttgggtgacagcgagttttccgggaagggtgcagacaacattaaagcattttatcatgatcatgccggcattacagatcaatgtatcgatcggattgacatggaaattgctttcttaagcatcatttttgcaaaacttgtagatgcaaagatgtaagatacttacatagaagagtcatttttaaaacatgagctggctaacgattacacaaaatcaaaattcattatgtctgaacaaaagaaaacgatgaaagacattctgaataacaccattgaataaatatcttaaggataaaaaagtgaattggtcaaaggaattgaaatatttaaaagggctattaggctccaaaacgcttgcaaaagatttaaaaatccaaatgaatgtttaagtatttgttttcaggtttagtgataactatgtctatacttaaaattatatccatttgataatccagagagaaaaaccttaatgtcccgtttaataggggaaagaactatgatatctcctagtcaccaatatataagaaatgggacaagcaaagatttgttaggcgcaactttaattaaataaataaaatagcaatcttgtgataatagtagctaatctgttggtacccttgccagcagcttttataaaacgtttttttgactttgagttgctctttcttagtctgataaaacttcttcattagcgtccgcttctcaatctaggatatgtgaaatcctcaatcgcattgcaaattcccgaaaagctttttctgtctttaaatcaagtccaaacttcattctctcggccgtctaagaagctaatttactgcttcttcttttcaggttccatgtaccggtctttacagtgtctgggagaaaaagtgatttggggcattcatctttttttatttcagctagcgaagtgaaagaccgatggcatttttcctgcatataatagctggaactattcaaaaaggcagggaatgaagttgagtgaatgatgtgattgtaaatggaggttttgaaacaggcaatctgacgggctgggcttctgcaaatacgtccgttattaatacttttgcccattctggaagatattccgcacagtttttcagtaaccagccgtatgcttttttagggcagatcgtgcctgtcgtttctggacaatctctgatattcatcgtttcgcttgggagaattggaaacaattcaagtccccaagtaactatacaaattttatttgttaacagtgaaggcgaagagattgaaggcggacaggaaattatcattgcttccggaaatttgccaaatgtctcatttaatacatggaatgaaatatatagaacaattgaaacccccgctgaagcagtaaacgcagtggtggtaataagcaaaactacttttgggtctgttctaattgatgatgtttctttaatagagtctgctgggggaattggaccgactggaccaacaggtgcaacgggagcaacaggcgcaacaggcgcaacaggcgcaacgggagcaaccggagcaacaggcgcaaccggtccaactggagtaacgggagtaacaggggcaactggtgcaaccggatcaaccggatcaaccggatcaaccggagaaacaggatcaacgggagtaacaggggcaaccggagcaacaggagtgactggatcaactggcgcgaccggagcaaccggatcaacgggatcaaccggagaaacaggtccaacaggaccaaccggagaaactggagcaaccggaccaaccggatcaaccggagttactggagcaattggagccactggcgcaacaggatcaactggtgcaacgggagtaaccggagccactggagtaacaggattaactggaccaaccggagaaactggtgcgacgggagtaaccggagccactggagccactggagtaacaggattaactggtgcgacaggagaaactggaccaaccggagcaacgggatcaaccggagtaacaggtgtaacaggatcaactggagtaacaggatcaacagggtcaacaggatcaacaggaccaaccggtccaacaggagtaacaggatcaaccggagaaactggcgcaaccggatcaactggagaaacaggagtaacaggatcaaccggatcaaccggagaaacaggtccaacaggaccaactggtgcaacgggagtaaccggagccactggtgcaacaggaccaactggtgcaacgggagtaaccggtccaactggcgcaaccggagcaacaggcgcaaccggtccaactggagtaacgggagtaacaggggcaactggtgcaaccggatcaaccggatcaaccggagaaacaggatcaacgggagtaacagggtcaaccggagcaacaggagtgacaggtgcaaccggatcaaccggagaaactggtgcgacgggagcaattggtgcaactggtgcaaccggagcaacgggagtaactgggtcaaccggagcaacaggagtaacaggtgcaaccggatcaaccggagaaactggtgcgacgggagcaattggtgcaactggtgcaaccggagcaacgggagtaacaggatcaactggaccaaccggagtaacaggtgtaacaggtgcaaccggatcaactggtgcaacgggagtatccggagccactggagtaacaggattaactggaccaaccggagaaactggtgcgacgggagtaaccggagccactggagccactggagccactggagtaacaggattaactggtgcgacaggagaaactggaccaaccggagcaacaggagtaacaggatcaaccggagaaacaggtccaacaggagtaacaggatcaaccggagaaactggcgcaaccggatcaactggagaaacaggagtaacaggatcaaccggagaaacaggaccaactggtgcaacgggagtaaccggagccactggtgcaacaggagcaacaggagtaatcggtccaactggcgcaaccggagcaacaggcgcaaccggtccaactggagtaacgggagtaacaggggcaactggtgcaaccggatcaaccggagaaacaggatcaacgggagtaacagggtcaaccggagcaacaggagtgacaggtgcaaccggatcaaccggagaaactggtgcgacgggagcaattggtgcaactggtgcaaccggagcaacgggagtaactgggtcaaccggagcaacaggagtaacaggatcaactggaccaaccggagtaacaggtgcaaccggatcaactggagaaactggagaaactggagatacaggaccaaccggagaaactggtgcgacgggagtaaccggagccactggagccactggagtaacaggattaactggtgcgacaggagaaactggaccaaccggagcaacgggatcaaccggagtaacaggtgtaacaggatcaactggagtaacaggatcaacagggtcaacaggatcaacaggaccaaccggtccaacaggagtaacaggatcaaccggagaaactggcgcaaccggatcaactggagaaacaggagtaacaggatcaaccggatcaaccggagaaacaggtccaacaggaccaactggtgcaacgggagtaaccggagccactggtgcaacaggagcaacaggaccaaccggtccaacaggagtaacaggatcaaccggagaaactggcgcaaccggatcaactggagaaacaggagtaacaggatcaaccggatcaaccggagaaacaggtccaacaggaccaaccggtccaacaggagtaacaggatcaaccggagaaactggcgcaaccggatcaactggagaaacaggagtaacaggatcaactggcgcaaccggagcaacaggcgcaaccggtccaactggagtaacgggagtaacaggggcaactggtgcaaccggatcaaccggagaaacaggatcaacgggagtaacaggggcaaccggagcaacaggagtgactggatcaactggcgcaacaggagtaacaggtgcaaccggtccaactggagtaacgggagtaacaggggcaactggtgcaaccggatcaaccggagaaacaggatcaacgggagtaacaggggcaaccggagcaacaggagtgactggatcaactggctcaacaggagtaacaggtgcaaccggagcaacgggagtaactgggtcaaccggagcaacaggagtaacaggatcaactggaccaaccggagtaacaggtgtaacaggtgcaaccggatcaactggtgcaacgggagtatccggagccactggagtaacaggattaactggaccaaccggagaaactggtgcgacaggagaaactggtgcgacgggagtaactgggtcaaccggagaaactggagtaacaggatcaactggaccaaccggagcaacgggagtaaccggagtaacaggatcaacagggtcaacaggatcaacaggaccaaccggaccaaccggatcaacgggagcaacaggagtaacaggagtaacaggtgtaacaggtgcaaccggatcaactggagaaactggagtaactggtgcaactggagatacaggaccaaccggatcaacgggagcaaccggagaaacaggagtaacaggatcaaagggagtaactggtgcaaccggagaaacaggagctactggtgcaactggagatacaggaccaaccggtccaacaggagtaacaggatcaacaggtccaacaggaccaaccggaccaaccggagaaacaggagcaaccggtccaacaggagcaaccggatcaactggagtaaccggagcaactggagcaaccggaccaaccggatcaacgggagtaaccggtccaactggagcaaccggatcaacgggagtaaccggtccaactggagcaaccggatcaacgggagtaaccggtccaactggagcaaccggatcaacgggagtaaccggagaaacaggagtaacaggattaactggtgcaacaggatcaaccggagaaacaggagcaacaggagcaacaggagcaaccggatcaacgggagaaactggcgcaaccggagcaacaggatcaacgggagtaaccggagcaacaggagtaaccggattaactggtgcaacaggagcaacaggagcaacaggagtaactggtccaacaggatcaacaggagtaaccggagaaactggtgcaaccggatcaactggcgcaacaggagcaacaggtgcaaccggatcaactggcgcaacaggagcaacaggtgcaactggcgcaacaggagtaaccggtccaactggagaaacaggatcaaccggatcaaccggagcaactggtgcaactggagcaacgggagtaactggagccactggtgcaacaggatcaaccggagcaaccggtccaaccggatcaaccggagtaaccggagtaacaggtgcaacaggaccaacaggaccaacaggaccaaccggttcaaccggggcaaatccacagctgttttacagtgaaatagcaggccccgttccgcttgctattaacggtactgaaacgtcgattggtactttaagtgtgccaacagtcgcaggacaattaataaaattagaccttgccatttctgtagatgttacaacgacagctaactcaaactttacttttcaaaccagaatttatagaaacggagtattagtagatacacgctccgtccaaagaaatatcagcgctgcaattacgtcaagatttccaattgctacaacgtatgtagatgctaccacggtcacaggcacgacttcttatgagattaggataatcttcacaacagtaagtaatgtgagtggcagcaacgcactaaacctagatataaatgctattaggttcccttaataatagagaattaaaaaatcacttttttaaaaaaattcaagcatatgaaacaagaaacctacttttaaacagtaggtttctttgtcgtggtattgaaaccttatcatgtctcggaatatccctccaaaaattttttaaggtaataagaatactggtctgtatcaaactcgttgccgcatgcatgtaagacccaaggctctttctgatgagggatgcccactatatatcctttttttctgaactcaaaacattgagaagtatcatataaatgccatccgttaaaaatatcttttcgccatggaacatcgtactgagtcgccagtaataaaccgtctaatgcttgaactgctttcacagtttcatcaatttcatcaaataataaatagttgtacgtgctgcggtattcaatgacttttccggcttttttagaagcctcccaccaaatcccgctttgcggcacttcttcagctcctataacgcctatcatgccaagctgatcattctgctgaaagacatggagaatatcataaataaaggaacgattgatgataaatgtgtcctgatgtaaatacactttatattttgagtcagagtcctccattgccgcctggtagccggacgccatactgtctgcgtctcggatattgattaattctaccttcatatgcggcggtacagaaagagactgaagatgtcttagacagagatcataaagggtatcgtcattcacacatgtaataaagctaattgaattttcgtttgtatgctgattcatcttttctctgcctttatgacatattgataggctctggcctcctcctcaagatctgcatggtgaattcccatgcatgatctgacataagcaagtttgctgatcattttttcataataatgagtcgtaaaaacaataggctcgatttggatgatcttgtagcctgtttcatgaaacatctttttcatttcctccaaggtgaaaaaacggaagtgtgttttatcgagcagccctgcctgtatatacgtccatttgccggacagcagactttcgaaaatcgagatatgtccgatattcgggatgcttgccaagatactccctgtttcttttacataaggcttgatgttacctaaaactgcccacgggtctattaagtgctccagaacatcaccgaagataatgtgatcaaatgtgtttttttgaaaaggcagcttcagtgtttcaatgtctcccgttattacttcgtcaatataatgtgttgctttttcggcagctggtggataagactcgatcccataataggagcaattcgttttttccttcacagctgcgccaaacaagccttcagcacatccgacttcaagaatggttttcgcatgcggttctatcagatcaaatagctgccagttgatgcctttgtaatactctttatcttttagctcatactctttcatagaatcagcaagtgaatttttattgatttccatgatgttcacccccggagccggtctgcatctttagaatatcttcaaaatattttttgttggctagcattcttgaatcatggggacggtattgcaatgccgattcattatgctgataggcaagctgatgctggccgagtttatcgtagcagacggctaattgcaggtggggaagccaggtcgcgcaggcgcggttttgaaaagccaggttttctgctcctttgttttctattgctttttcataccaatagaccgcactctgaaaatcgtttttttctaaaaaagagtatcccagcctgcagcaggtttctgctctaggcggtccatagacgagcgtgtggagcacccagcttaattctttttccttcagccccagtgaatggtagcagtctgctaatttattgcacgctctgatattatcctctacccatccctgcttcgtttgtaaaaaacgtaaatagtactcaatcgcttgctccatttttccgtgatcacacaactcgttcgcatagtaaaataaatctcttggagaaaaatcctttcctgacgaggccattttttcataaattcggaggttgcgatctgcgtcatgactaagtggcaggtgagaaaccgctgcatcactgtggtgaagtttcccatatacttctaggtattcatgaaccgcgccgatccatttaaagctcttttcccgttttacgagccggtatctccttaagctggatgtgacgttattttcttcatcaaaagccaaatggtatttcattgagaccgcgtctatatccggatcaagcgttctttttaaatccaataacagctcttgatctttcttggtaaacacgtcgtcggcgtcaagccataagatatagtcggatgtcgcctgctgaaacgaaaaatttcgggctgccgcaaaatcgtcaatccatttaaaatcaaagattcggtctgtatagcgagcagcaatgtctttcgtcttgtcaactgacccggtatccacaatattgatctcatcagctatctcctgcacagaatctaagcatcggccaataacagcctcttcattttttacaatcatgcataaactgattgaaatcacatcgccacctccgttttattctgttttttctttatggcatggacaaacatgtaatcaatatgggcatgttttgacaagtgatccaaagacaaaccaaattgcccggcaaggaattgaagttcttgtaaaaagagctgtatgtttgattcagtatcggaggaatgggaggtgatggattttatgtcataaaggtattcaggaaatagggtatttacgttgcgaggtgtgatgaaatgtgtgtacgtcgatgcaccacataataaagagaaaaatgtatctgcataggcagtatttgggatgctgcaaatcagcgagccagaaggctttagataaacggcaagagtctcaattgtatgtctgggattttttgagcagtttaaaaggtcaccgatcaaaattacatcgaaaaaggactcagggtaagggaggtcgcatgtttccacatctgccgaaatgacttgttcgtaataggggcttgcaatggtctgtaataactcatccttttcaatcccatacaataaacaggattgccggttcaaaagttctgtccccgcagctcccgtgccgcaaccgatatgtaagatagagtcggcttccgctggcacaagtgctgtcagctggggctgggagtcaaagaatgttgttacatccaccttccatttatcgatgaagcgttgccggttttcttcgtataattgattgatgcttaaatctggattgcctgtaaacgtggcatgaccgtgatggtggacaaacgaatcaagagcgataattagctgataccccgcttgcagtacgcggaggcttaaatcatcatcctcaaatgaaccgcctacaaaacgttcatcaaaaccgccgacttcatccaacaccttctttttgacaagcaggcaaaatccgaccagcctcaatacagcttttgatctgcctcgctgctgcaaacagtaaagacgagaaaaatcttcaatttcttcaacgtttgtatagttaacgggaacttgctgcggaccgctgacataattgcttacaggcccgaccatgccgattttatcatcctgataaagcagcttgatcattggctccagccattgatttgttacaacagtatcattgtttaaaaaaagaatattgtcccctgaggcaacttcaagaccctgattacaggcttttgcgaagccttcgttcgtcttattaaaaatcgccttaattgaagttatctgtttgaggtagtcacgtgtaccgtcatgagagccgttatctataacaattacttctatacagtcattattcgtatgcttccatatgctctccaagcattgttttgttaaagctaattgattataagtcagaacaataatactcgttttcactataacctccgcccttcgccatatcattcggatactatatgtatatcgtaatgttcagacggaatgattctttcctgtaaaaaggagaatgctgcttaaacgtaaaaatgtgaatggttttttaaagaaaaagtcgatgaatttgttttacatttagttttcccttaaggggatcaacaaggttggggaattcagggaaatagggatgataagttgccttaaccagtttgtatgaaagttatatttaattctttctgtactaaatggtgaattaggagttatatatttaaaggagaataccgatgagggcattattttatttaatacgtttatagcaggggagaaggacgaaatatcggtcagataaatttttatataggtttcgtgactttaaagggatcaattatgatttatagaatgttttttgtaactcaaactagttgagtactactttagaaagaatcatcgtgtacatataaacaatgataatttaatgaaatggacatcaatggtgtttccagaacatttaacgtagtttaaataagatttgattgacgtatcagaaattgaaaaaccgtccttagattagcaacatattgaagagatggatcttctagtctatgaggcacttgaatttaacaaagaattgctatcgagactatttgagatgtgtcgtaaatccactaataaaatctgtttttgaagaaatgtttaattcttaaaatggttaatcaatttaagtgcttcatttaagtctcttataagccgataaagtttactggaggacacaaatcataaaaatccccccaaaaaaatttttaagggggaataatacatatttaagaagtgtgacctctacttgcaacttcaaatgagtctttctcaataaaatatccaatatttttactccgactttagaagaagagatcatttgctccaacacaagccctcctatattaaatatgtaatattttatcatatttaaatgaataaggaagattaatgttatcttaaaaaacaaaaaagcctcctgcaaattatgagaagggtaagggaatatttttgagaatcatattccattgcttgttcacagtcagtaatccttgagttgttctagcaagaggcaatattgttgaataagaatagttttaaagaggttattgttgtcttcatattgaaataaagactaagtatattagaggggagttactttaatgcatatcacaacaaaaaggttattgatacgtgaatttgcattcacagattggcaggctgtatatgagtatacatctgatagtaatgtaatgaagtatatacctgaaggggtttttactgaagaagatgcaaaggcatttgtaaataaaaacaaaggtgataacgctgaaaaattccctgtcatactaagagatgaagactgtcttataggccatattgttttttataagtattttggtgaacatacatatgaaattgggtgggtgtttaatcccaattatcaaaataaagggtatgcttctgaggcagcccaagctatcttggaatatggatttaaagaaatgaacttacataggattatagctacgtgtcaacctgagaatattccctcataccgagttatggagaagattggaatgagaagagaaggcttttttaaaaaatgtattccaaaaggcaatgaatggtgggatgaatattattacgctattttagaggaagagtggaattgtaagagaggtaatgcaggaaattgaaaccataacagctatagaacgtatagtgatagtagggcttatagtgcttaatatgaatgatgtgagaggggtatccaaatgcaaattcatctcaccaaaagcggaaaacaagacaatcatcataaatggttaggaactgtcttgctcagttggggaacattcgtatttgctttgttttttgctactttagtcggttcaatggctagccaagcaggagcttccaagcttttgaagcaaggcatccaagcaggtttagtcacattaataactgtcccgttgctctacattcttcttaaacggatgtctagtagacccttttattctataggactgtctgggtggcggcaagccattccgaaagccataataggagcaatatatgtgattgtactatccgggtctggtttcgctatcgcccatttattaggctggatcaaagttacacaatttcacttctctgtccatttagtgacagcattgctcttaaatatgattatcgctttcttttatgaagcttttccagaggaattaacttttcgggggacggtgtactatgctctaaataagcgttggaactgttttatggccttactcctacagccgatcctgtttgtgcttgcaccaataactgtaagtggcttgcaatatatagttggaattgaatcatctgctatcacattagattacattgttttattgttgggttttggattcatccttcaactcctgcgtattgtaacaggaagcttatggacgtctatcgcttttcatctagcctttcttgaaaattctcggttcttcgtcctgcaggggaaggagcgctttattacctatgaagaaattgttccgggaacaggtgcgctgtttgtgatcttttttatgttgcttattgccggtactctactcttaatacctgttgcgataactcgccgaaatactattcaatggcggaagaatgagaaatgcgaccaagatgtttaatttctaagtagaacagtagttttaaagtgattttaaggaggatctagacaatgttgaagaagcattcatgatgaaagattagtagattttgattctcaaggtggaaaccatattagtgtttatttagttactcactttgagttatctgatcaatcgtattcttttgggtatgaagcataactgttcgtatgcaatggatattctaagcgttaaagaggaatttgatttcgatttcccatttaatatgcttgcaataaaaagctatgtacaagaattaataaaatgttagggattgatataactctgcctgaaatgaaagaaagagattttgacaaactttctcaagattaaataaaactacgattttaaagagaacggagacttgctttcaatatgaatgttaaaaaaactgcagctgttttttcaatcacgattccaattatctcagctatcctaattattaatttttttacgggagttatgtcaattccatggcaaggaatgccggtgttttttccattattgctttctcctataggaatcattttagcgttcgtttcaataaagacaaataaacggtgtgctttatatgggattgtcttaaatgcaattatgtttccatttccttttttctggtttatcggaggggctttgttttttggagtttaaaatccattaggcattacgcttatacattggtattttcgaacttgtcaaaagaaggaataaaaaaatttcagaattgcttggctttactttatgttgaaaggggtcgagtaaggtggataggaaaaaggatgaaatacaaagaaaatatagggaacaaatgagggagaagaaagaacgagaaaaagaagatggcagttcacatacttttgaaattgttgttgtgctagccattatcattttgatgtttttctttaattcagttttcaaggctttttagatattgtacagatgactttcaggatgtttgaaaaaataaccctttgatatatataccacatgaaagtattgaaggacttatgaaaattcaagagccagttgaatcttaataattaatcaccaaataatggggatgtaaaatgaaattgtataatgaatttatcaatatagctaaaatttttaataaagagctagacatcattccattattatatggatctttaggtcttgaaaaggtaactgggttagacttttctccagaagatattgatctccttattcctttaatttttttagaggaaaagtgggaaaaactaaaaaaagtgatggaactgcatggatacaaaatggttgatttacatgagcatgaatttaagaaaactaatacaaaaataggcattgcttacattgaggatttaaaagcatttgcagatgtagactataataatctagaggtttttgaagatggcggagcgaaatatcatttgctaacgattgatgattacctcaaggtttataaaaagtctttattagatggttatagaagaaggaagaagaatcataaagaccaaagtaaaattaacatattgaataaattaatacggaattaatttctgtattctcttttgtttccagtctcaattaaaatttttaagattaaaataagtttgaaaggataaatcatagtgtttaacacagccattaatcctcagacagtcaaaaagccatttctactccggttgaaagcttttcaatttttgcttcttatttatctttcctgtattgatatatgtatgtagggttggacttataacataaactattctggccattcctgttctttcaattcatgaccgggcttgccatcagcataaatctaggctaacagtctccatacatcctgtgatcacctttatcaaactcttaaatgcaacttaccactaaccaattctttatttcgcatagatcatctttgtcatgtgtttacacaagaatctgttttggactaatcgtcgttaactgatacatgacattcgcaaatatttgagacactgaatataacgaaacagtcaaaaatcaatatttaattcattctgtttaaactttctgaaaaagatgttgaaaaagttgaaaggattttataatattaaaacaagttagtttgttcgatcaacaaactaataagatgaactttcattgtccacaagataaggtcttactaaatatggatggaagggggataagagggtcgatttaatggagctaaacaatataagaaacgaaagaatgaggcttttatccttttccaggtatataaggtatgacgagaaaagatgaattttttgcttgctgatcaccatattttttcgcactgttttgaaagcgcttttataaaagtttactgaccgtaaattcgagaaattgttataccgtttcacactgttccatattaaaggatcgaaaaggggagaaatcatgctcagtgaaaatgtaaagaagattagcatggttgaaaaagttggatatgcgtctggagattttgcttgtaatttaatttatgcaacagtgtctacgtatcttttgttcttctatacagatgtttttggtttatcggcagcagcagccggtactatgtttttagtggttagaataatcgacgctctcgctgatccttttatcggaacaatagttgacagaacgaacagcagatttggacgctttagaccgtatcttttattcggagcttttccatttgtcatactggcaatactctgttttacaacaccagacttttcggatatggggaaattaatatatgcctatataacctatgttggcttgtcgcttacatacacaacgataaacgttccatatggcgcgttaacttctgcaatgactagaaataatcaagaagtggttagtataacttctgttcgcatgttatttgcgaatcttgggggacttgtcgttgcattttttgttcccttactggctgcttatttaagcgatacttccggcaacgagtctcttggctggcaactaaccatgggtattttgggaatgataggcgggtgccttttaatcttttgttttaaaagcacaaaagagcgggtcactcttcaaaaatccgaagagaaaattaaatttacggatatatttgagcagtttcgtgttaatcgtccacttgttgtattaagtattttctttattattatttttggagtgaattccatcagtaattcggttggcatttattacgtaacgtataacttagaaagagaggatttggtgaagtggtacggtttgataggaagtttgcccgctttggtcattttaccgtttattccaaggcttcatcaatttttggggaaaaagaaattactaaactatgcattattactgaatattatcggcctcttagctttactgtttgttccgccaagtaatgtttacctcatacttttctgtcgattaatcgctgctgctggaagtctcactgccgggggatatatgtgggcgcttattcctgaaacaatagaatatggagagtacaggactgggaaaagaatgggtgggctcatttacgctataatcggatttttctttaagtttggtatggccttaggaggagttgttccgggtctggttcttgataagtttggatatgtggcaaatcaggcacaaaccccaacggcattaatggggattctaattacaacaaccattattcccgtgttcttgctggttctagctttaattgatattaatttctataacttagatgagaaaaaatataaaaacatggttcgagaattagagaatagagacaaagtttatttggatcatattgatgatttcaaagcttaaaaaagaaaataaactgaggaggagtcccaaatgaagattaccaatccagtacttaaaggattcaatcccgatccaagtatttgtagggcaggaggggattattatatcgctgtatctacatttgagtggtttccgggagtccagatacaccactcaaaagatttagtaaattggcacttagttgcacatccattacagagagtttcacaattagacatgaaaggaaatccaaattcaggtggggtttgggcaccatgtttaagctatagtgatgggaagttttggctgatctatacggatgttaaggtagtagatggcgcatggaaagattgtcacaattatttagttacttgtgaaacgattaatggtgattggagtgagccgattacattaaatagctcgggatttgatgcttctttgttccatgataaggatggaacaaagtatttattaaatatgttatgggatcaccgtattgatcggcactcatttggaggaattgttatacaggaatattctgataaagagcaaaaattaatcggtaaaccaaaagttatatttgaaggaacggatagaaaactgacagaagctccgcacctttatcatatcgggaactattattatttattaactgcagaaggaggaacacggtacgaacatgctgctacaattgcccgttctgcaaatattgaggggccatatgaagttcatcccgataatccaatcttaacgtcatggcatgacccaggaaatccattgcaaaaatgtggtcatgcatccattgttcaaacacatacagatgagtggtatttagctcatttaacgggacgtcctattcatcctgacgatgattcaatttttcagcagagaggatactgtcctttgggcagagaaacagctattcaaaaactttactggaaagatgaatggccctatgtagtaggtggaaaagaaggaagcttggaggtagatgcaccttctatacccgaaacaatatttgaagcaacgtacccggaagttgatgaatttgaggattcaacattaaatataaattttcaaactttaaggattccattcacgaatgaattaggttcattgactcaagcgccaaatcatttacgattattcggtcatgaatcattgacctcgacatttactcaggcatttgtagccagacgctggcaaagtctccattttgaagccgaaactgctgttaagttttatccggaaaattttcaacaagccgctggattggtgaattactacaatacagagaactggacggctcttcaagtcacgcatgatgaagaacttggccgcattcttgaattaacaatatgtgacaacttttctttttcacagccattaaataataaaattgttattcctcgtgaagtaaagtatgtatatttaagagtaaatattgaaaaagacaaatattattatttctattcttttaacaaagaagattggcacaaaattgacatagcactggaatcgaaaaaattatcagatgattacatccgtgggggaggattcttcacaggggcctttgtagggatgcaatgccaagataccagtggtaatcatattccggccgactttagatattttcgttataaagaaaaataatttgcacatgaaaaaggagatttctattttagaactcctttttcatatgagaaggtgcctatgtcactattgcttcagaaatacccctagaataaaaaaactcatctttaaagatgagctgtacattccataaaaattacattgtaaccatgtccagaaaatgatcaatcacaatggaggacattcctaatgccggcgcattctgtcctaaggaagatggcaataattcatagctattgcctaattgggaataaacccttgacgatacttcacttctcattgaatttaaaaccataggatgtgattcaattatgctatttcttaaaattacggcctgtgggttgaaagtattcaaaatattggtaaggcctattcctaaatagaatccaaaattctgtaatgcgtttaaggttccgatatcattcagatgggcgaggtttatgatgtcttgataggacagttttttctctttggtctgaagagattttaataaagccttctctgaagcatacaattcccagcagcctcggtttccgcaactgcatttaggaccattaaagtctattgtcatatgtcccatttctccagaaaagccgcttactcctctatataaatgattgttgataataacaccgatccctatccctgtgctgatacttacgtaaataatgttatcgtgattttttgcagctccaaatactttctctccatatgcgccagcatttgcctcattttcaataaaaacaggcacattgtacttctcttgtatcgaagattttaagtcaatatctctccagttggagttcggagtgaaaacaattttttgatctttatcaatgagtccaggcacgcaaatacctataccaataagcccgtacggagattggggcatatgcgtcataaagtgatgaatcatatcaatcaaaatgtctttcgttatttctggagaattggattccaaatgacggtattgatcaagaacgatcgttccttcaaggtctgttaaaatgccattgatataatccacaccaacatctattcctacggagtatcctgcctttttattaaaaacaagcatgacaggtcttcttccgccacttgattgtccttgacctatttcaaataccagattttctttcattaacgtgtttacctgtgatgaaacagttgatttatttaatccagtcatttcagataattttgctcttgaaataggtgaatttttaaggatttcttttaataataacttttgatttacttttttgacaaaggtttgatcagcgatatccacttcatccactccatttgtttaatctttaaattaagtataaacatagtacatagcgaatcttccctttattatatctaatgtgttcataaaaaactaaaaaaaatattgaaaatactgatgaggttatataagatgaaagtaagttagtttgtttaaacaacaaactaataggtaacttacaatatgaaataaaatgcatttgtatttgaatgatcaggttttgaatttatttttaagggggaaatcacatggctcaatctcattccagttcaaccaactattttggaagcgcaaacaaagtggtttacgaagggaaagattcgactaatcctttagcatttaaatattataatcctcaagaagtaatcggcggaaaaacgatgaaagagcatttgcgattttctattgcctattggcatacatttactgctgatggtacagacgtttttggagcagctacgatgcaaagaccatgggatcactataaaggcatggatctagcgaagatgagagtagaagcagcatttgagatgtttgaaaaactagatgcaccattctttgcttttcatgaccgggatattgcaccagaaggcagtacgctaaaagagacaaaccaaaatttagatatgatcgtgggcatgattaaagattacatgagaaatagcggcgttaagctattatggaataccgcaaacatgtttacgaatccccgtttcgtccatggtgccgcgacttcttgcaatgcagatgtgtttgcgtatgctgcagcacaagtgaaaaaagggttagaaacagcaaaagagcttggcgctgagaactatgtattttggggcggccgtgaaggatatgaaacattgttaaataccgatttaaaatttgagcttgataatttggctagatttatgcatatggcagtggattatgcgaaggaaatcgggtacacagggcagtttttgattgagccaaaaccaaaagagccgaccacccatcaatacgatacagatgcagcaacaaccattgcctttttgaagcaatatggcttagacaatcattttaaattaaatcttgaagccaatcatgccacattagccgggcatacattcgaacatgaattgcgcatgacaagagtacatggtctgcttggctctgttgacgcaaaccagggtcatcctcttttaggctgggatacggatgaatttccgacggatttatattctacgacattagcaatgtacgaaatcctgcaaaatggcggcttaggaagcggcggattaaactttgacgcgaaggtcagaagatcttcttttgagcctgatgatctaatatatgcccatattgcagggatggatgcatttgcaagaggattgaaagttgcccacaaattaatcgaagatcgtgtgtttgaagatgtgattcaacatcgttaccgcagctttactgaagggattggtcttgaaattatagaaggaagagctaatttccacacacttgagcaatatgcgctaaatcataaatcaattaaaaacgaatctggaagacaggagaaattaaaagcgatattgaaccaatacattttagaagtataacaggataagctccagatcctgctatcaataccaagtcactgaattacccgtcatgattcctttcctattgcttgttgttatgacgggtaacttctataattaggatttatttagagtgaatggtttttaaaagggcaaggagtgaaaaaatgaagtatgtcattggaatagatcttggaacgagtgctgttaaaaccattttagttaatcaaaacggcaaggtttgtgcagaaacgtccaaaaggtacccgctcatccaagagagggcgggatatagtgagcaaaatcctgaagactgggtacagcaaacaattgaagcattggctgaattggtttctatatccaatgttcaagccaaggatattgacgggataagctattcgggacaaatgcatggattagtactgcttgaccaagatcttcaggtgttacgtaatgcaattctttggaatgataccagaacaacgcctcaatgtataaggatgaccgagaaatttggcgatcatcttcttgacatcacaaaaaaccgtgttttagaagggtttacattacctaaaatgttatgggtaaaggaacatgaacctgaactttttaaaaaaactgctgtgtttttgcttccgaaagactacgtgcgattccgtatgaccggtgccattcacaccgaatactccgatgcagcaggaactttacttttacatattactcgcaagaagtggagcaatgatatttgcaatcaaattggtatttctgcagatatttgtcctccgcttgttgaatctcatgattgtgtagggtcgctgcttccgcacgttgccgccaagaccgggctattagaaaaaacaaaagtgtacgctgggggagcagataatgcttgcggcgctattggagcaggtatcctttcttccggaaaaacattatgcagtattgggacgtcaggggtcatactttcctacgaagaagaaaaagaaagagactttaaagggaaagtccacttttttaatcatggaaaaaaggattctttttatacgatgggcgtcacgctcgctgcaggatacagcttggactggtttaaaagaacgtttgcaccaaacgaatcgtttgagcaattattgcagggggtggaagctattccgataggagccaatggactgctatacactccttatttggttggtgaaagaacgccgcatgctgattcttctattcggggaagcttgatcggaatggatggagcccataatagaaagcattttttgagggcaataatggaaggtatcacattctctttacatgaatcaattgagctattccgcaaagcgggaaaatcagttcatactgttgtttctattggtgggggagctaaaaatgatacgtggctgcaaatgcaagctgatattttcaatacgagggtaattaagttagaaaatgaacaagggccagctatgggggctgcaatgctggctgcctttggaagcggatggtttgaatcccttgaagaatgtgcagagcagttcattcgtgaggctgctgcattttatccaaaggcacaaaatgttcaaaaatataaaacactatttgatttgtataagaacatttatactcacacaaaggatctcaatcaagctttgaagagctttcgaaaaaactaatgatgttattgtctggagatcaacgaaagaacaattaacgattaatcatcaaaggcctttgatgacatggctgccttcttttgaaaagatggtgagaataaggtatcgcaacctttaaacagtattggagtgtccagcagacaaaacgaacgagcggaaccgtattctgtcagcgaacacttcaagaagtgagaaagcttaggaatgccaatgggtaagatgtatgaaaccgcgctaacgacggtagagggatctcttgatttatgatgaaataggaaggatgtttacacacaaataaccccctcacattgacgtgaaggggtgttttttattgttactatacagcggaaattttacaggctagttgcatgattttagcttgataagcagaatggaactagactctccatcatctctttctaattctttggaaactgcattctgctaggtttgctgctttttttaacaaacagtgtttttctatttcacacagccattaaatcctctgttcgtcacataaccgctcttactccaaattgacagtttatctgattttgcttcttgctcatctagtctgaattggtctatgtattttgtgttaggctcatatacatatgctactctggccaatccctctttcaataatgtctcttgaacagatttgccgtcaacataaacgtatgctaacagtcttccatacttatctctgcgatcgcctttatcaaattccagctgtagcttaccgctgttgaccaattctttatttcgtttcgacgcatcctcaccgtatggttgaacacaagaatttggtttcttcgtctcaggtgtatcaacgagcaagtagcgcactgtgtcttcctttccgttgtaaataaccttaatcgtatctccatctattgctctatctaatgtaacatcgaccaatttcttctgattttttgaatgaggcgtgccggccttttgttctgtctgattatatttattagattgagtatcttgagagacttgctccgtcccattagaatctgaatggtttttggctgcgtgatttgatccgcaagctgccaaagtaatacttaaaacgattgcgatcatactgatcaaaatcttcttcatattgattccctctttatcattttctctttttgcgtttaaacatcatcattataacgatatggacattttttgtgaatggaaaacttcaagggaacttataacactccaaattgccaatagttaactttacaacgagatgatcaaaacatcaccatcacatagcggaaataaataatcctgaaaataatattgactgaaaatgcttttggaattatgataatatgagaaatgacaataatgtaacaaaaacattactacaacataacaactgatagcttaggtttattctattggctaaaaatgtaaacggttacaaatccagaggcgaaaatctaagatagagatgactttagttttgactcaatatccacactgaaagagcttattaagtattcttaataaaggcaggggaaatggatatgaatgaacatcgaaatcgaaggttgaaattaataatgatttcagcaacttttggagggcttctctttggatatgacaccggagttataaatggagctttaccttttatggcaaggccagatcagcttgatttaacaccggttacagaagggcttgttacgagtattcttttattaggtgccgcatttggagcgttgttatgcggaagattggctgatcgatatggccgacgtaaaatgatccttaatctttcctttttatttttcctggcatcactgggaacagcgttagcacctaatgttttcatcatggcggcctttcgttttttactggggctggctgttggaggagcctcggcgatggtgccggcctttttagcagaaatggcaccgcatgaaaagagagggcgtatggtaacccaaaatgaactaatgattgttggcgggcaatttttagcatatgtttttaatgcgatcctcggtgtaacaatggcaaatacgggacatgtttggagatacatgctagtcatttgtgctgttccggctatcatgttatttgccagtatgcttaaggtcccagaaagcccccgatggctaatcaccaaaggcaaaaacagtgaggcgctgcgagttcttaaacaaattcgagaagataaacgtgcagaagctgaatgtagaaaaattcaagaagcggtagaaaaagatacagcactagaaaaggcatcactcaaggacttttctacaccatggctgcgccgtcttttatggattggaattggtgttgccatcgtgaatcaaattacaggtgtgaactcgattatgtattatggcacacaaatccttaaagaatctggttttggtacaaaagcggctttaatcgctaatattggaaatgggctgatatcagttattgcagttatatttgggatttggctggtcggaaaagtgagacggcgtccaatattattgattggtttggcggggacgactacagctctcctattgattgcgattttctcaattgtgcttgatggatctatggcacttccttatgtagtgctttctttgaccgttttatttcttgcctttatgcaagggtgtgtaggacctgtgacttggcttgtcatagcggaaatattccctcaaaggttaagaggacttggttctgggataagtgtttttttcctttggatattaaactttgtgatcggttttgctttcccgatcttgcttagctctgtaggtttgtcttttacattctttatatttgtggctttaggtgtattggcaatcggttttgtgtacaaattcatgccggaaacaaaagggcgtacacttgaagaattagaagagcattttcgttctcgacacgatcataatactcctgaacaatcagttattgagttataaatatgttgaaaatctctcttcttataggagggatttttttagtttcagaaaaaacaaaatccctctggtagagggattttgattcagcattttaagatgttctacacgtataatactggagttgatactttaaaaatctcgccatctcttatataaaaacgagggatgcggcggcttaatgtagacacgacttcatagttaatcgtattgagcatttcagccacttcatcaacggaaatctcggctcctttttgcttaccgtaaatcacgacttcttctccttgtttaccttcaccgttttctcctaaactgaccatgatcatatccattgttactcttcccgccactggcactcgttttccgcgatgaagaacaaatccgcgattggaaagggcacgagaatagccgtcagcatagccaatcgggagtgtagcaattacttcattaggttctgcgatgtatgtagcaccatagctaacggttcggggttctgtccgcatggttttcacataagcgatgcgtgcctttaaacttaacgcaggttcaagcttaacgagatttagttgtttaatataggctgaaggatataaaccatataagccgatacctaaacggatcatatcagcgctaaattccggaaatgcgatagctgcagccgtgttgcacatatgcacggtgggcagctcaatcccctgtttttttaaaaagctgagaaaactgatgaatttttcatgctgcagctttgtgagtgtggtgtccggttcatcagctgtcgaaaaatgtgtgaaaatccctgtccatctgaggaatttacttgcctttaaggctttcactacttctaaaagttcttcctttgtgcgtacacctaatcgtcccatgccggtatccacgttaatatgaatggccagccggttagcactcgcttctttttccaatatctcgtttgcttctttcatccaatcaacctgaaatgctgataatgttatattccaagctgctgacttctttacacaactaagggatgtaaaaccaagcacaaggataggtgctgtaatcccagctttacgtaaaacgattccttcctccacactggcaacagcgagctcactcgccccgtgttccagtgcatggcgtgccacttctatagacccgtggccataaccgttcgcttttacaacagccataattttgctcttatgtggaatatgacggcggatcgctcgcaaattctttttaacggcatcaagattgacttcgatccaaacttctcggcaaagctttatcatcaacgcttccttccttcttatggattgtaaataccacctattgccgcaagaataaatgttaattgttggatgattcgatcttattttattcaactttatttgaaatcattcaacagcaaatccatgtgatacgagaaggtgcctatcaatgttcgaataatagcaagtacgggatacatgaggcttgtaagtggggtgttaatggatgcggcgaccgaggattacaaaaatgattatttgttttgggacatttttttctaagggtagatgataacgagaaatctaatcaggaaatacttaccgttgttatgaacattgaagaaccttttaaatgagaagggctgaggaaattctgtaaaagataatcggttgaaaaggcagtcgattccttgttccataaacctaacatcagagtatataattatactcgtattcacaaaaatcgtttaagtaaggggtatacatgaataggggagttagttttcaaataccgaatgaatatggaaattttctatggagaatactgcagccggtagaaatagctaattataggtggcaaacgagtggggaatcttattttgttgtagaaggagagctcgatgatgaggagctttttcatgactacgcaattgttgagggggcagtttttgagcaacaattaaaaacgaatcagtactataccattttcgttgaactgaaagcatttccatatggaaaaatggttaatcaagtcaatacatatgaagagtttgctgacagtgattgcgaacttgtccttttgatagcagataatagctacgtttcgatttactgtaaaaacaaaaatatcattgaaaaactttacttcaatgctttacagaatgattttgaagacgttcaatttataactgatgaaaatgacacaagaacaagccttactgtatgatactcaataaaaattaaaggagctagtacatgacaatgcaaattaaaatcaagtatctagatgaaacacaaacaagaatcagcaaaattgagcagggagactggattgatcttcgggcagctgaagatgtaacaatcaaaaaagatgaatttaagcttgtcccattaggtgttgcaatggagctgcctgaaggttacgaagcacatgtcgtccctcgttcaagtacatataagaactttggcgttattcaaacaaattcaatgggtgttatcgatgagtcatataagggagacaacgatttctggttctttcctgcttatgcattgcgtgatactgaaattaagaagggtgatcgtatctgccagtttagaatcatgaagaaaatgccggcggttgaattggttgaagtcgagcatttgggaaacgaggatagaggaggactcggttcaacaggtacgaagtaaacaaaataaatccttggctgtcttcatgctgtgtgattgatcaatggaggtttcagccaaggtacaaagaaatacttttatctaaatttttataagtaggggaaggcaactacaaactagtaatgccactaataataagccaagttaaatgacatgtgttcattaataattgaatttacagcagccatgagcacaaaaaaatctgagtatcgtcgataaatatcataaaaaaccccccggtatgtcgccggggaataaatagacgtttaagagatttagtgatgttttttatatgattcgacaaaatcataataatgatcatcgtcatcataatactttttttcgtaatgataatcgtgatcatcgtaatactttttatcatggtcatcatactttttgtcgtaatcataatgttttttatcatgatcataatacttgtcgcaatcataatgcttcttatcattgtcgtaatactttttgtaatatgtttttttccaagtgtaatactcttctttatattttttataataacccaattaaattcctcctttatgttattcgaatttaatttatgaagtttaaatgatatggtatggtcaaatgaaataagaatagtaaaaagaggctgtttaaaacactttctgaaaaacaaaacggatagctgtttattaaaacaagagcgagagaaagcactcaatcactgtaaaataatagtaaagtgtatagagaggattaatatacgtaaaaagggactttctcattgaagaatatttgaacgttatggttaagattcagagctctatgatgtgatttttaacactgcttttgaaggatttaaagttagacatcaaaaacaaacagcaaaaccggttagaaacagatcatataaggaatgaaccgctgccaaatatcataaaaaagttgttaatgatcaaatgaatgaaattagagagaatttattttaaagaaagcccaattgcacatggacaaatgacaattgatattgaggtaaaatacaatgcattaaatcagaaaaagctattggaggatttaatgtgtttagacaatttccaatttggtatacacaaacacctgactatttgaatttttatgtaccgcaatatcaaaccatttcgtataatcctcaacaatgttatcaacggtgtatgtaccaaactggcggtaactatgagctatgtgacagactatgttatggagaaatacaggtgtaaaagaggggggattaactcctctttaaacacacagtgagtggaataagatcctcactttatctgcaagtgcttagtatttgcgataatattgcattcgtaataaattatgcttagcaactgaaaatgaaagaaggatatgaatagtcatgacgcaattcgataaacaatacaattcaattataaaggatattatcaataatggaatctcagacgaagagtttgatgtaagaaccaagtgggactcagatggaacaccggcacatactctaagtgtaatcagtaagcaaatgagattcgacaactcagaggttccgattttaacgacaaaaaagcttgcctggaaaacagccattaaagagttgctctggatttggcagctgaaatctaatgatattaatgatttaaacaagatgagcgtacatatttgggatcaatggaaacaagaagacggcaccatcggacatgcatatggatttcagttggggaagaaaaacagaagtctaaatggagaaaaagtggatcaggtagactatcttcttcatcaattgaagaacaatccatcttcacgcagacacattacaatgctgtggaatcctgatgaattagacgcaatggccttaacgccatgtgtatacgagacacaatggtacgttaaacatgggaaactccaccttgaggtaagagcacggagcaatgatatggcattgggaaatccattcaatgtattccagtataatgtgttgcagcgcatgattgctcaagtgactggttatgagcttggtgaatatatctttaacattggggattgccatgtgtacacacgtcatatagacaatttgaaaatccaaatggaaagagaacagtttgaagcacctgaactatggatcaatcctgaagtgaaagatttttatgactttaccatcgatgatttcaagttaatcaactataaacatggggacaagcttttatttgaggtagcggtttaatgctgcctttttattgttatttttcagaatataagctggcattaggctaaaaatgaagaaatttcttcttcatatttctataaacaaatagtaaacaaaattggagcccaacgcgaaacaaaaggattgttagaagcgttgggttctcttagtacaagtgaacaacgattgcgtggtctgaaaaattaaacgaacgatatgaaaaggccattggttttataaggtgttaattcctcctattaatatcataaggctcaagaaaattgtaatgaaaagaaaagcccatactatagctgtaaaaggattgttgagtcccatcctttctttccaatttatattagtggatcgattggttttgtattttattaactggatacataagatcacattaaaaaaaactgaaataacaagagctataactaaataaaggttcattttcatcaacctttctaggttttttaaacacttgaatagcttaattgtaaacctaatattaacatatacatatttcaccttaaaagaccagcatcgtgcaatgaatacaattactttgtgcagttctaggttatttgtttttattatgaaactttttggtccctggctaaaattcaacttaaaaatgaaaagattgaaattatccatgattgtgtttctgcgatggattgccttaaaatttggtagggatgaacaagcactatattaaataatactataccaatgaatttctattagaaaaattcataatattttaaaataaccatttaaatatatttctagaaattgtatacttatatggtactaaatgaatacatagaaaggactgttgtcgatgaaaaaagttttttgtaagttagccattagttctatagctctatttaccctatctcttcctaatggcaatgtattagctgctgaaaaaggggaagaaaaacctgtctcaattaaaggcgttgagtcacaagtgcatactgtatttgcaaacgagacaactggggtaaaaagcaacttaggaggaggagagtttactgcgcaatttgtgaatgattttcgtaatgttaagatgaatgtaaaaacatataaaagctggtctagctttaaaagagtttctgataatatagcaacggggagtaaaggaggatctattactgcaaacaaaacagttacttttacaacaactgtcagcggatctataagtggtttaggaatatccactgcaggctctgtagctagctctaaaggatacactctaaatgttggagcgaataaaagagtctatatggcatatagagttaggtataatgtagaagaagggtacaattgtcgtaaggatatagttactggtaaatgtgtatcaaagaaaaaatacgtagttaaaaaacctatgtatggagaatatgcactgaaaaactattaattttatataaaaaagattagctataaaagctaatcttttttattaagaagaaaatatcctaattttgaaacgagatacaaagtgaaagcaatcattaatgttctcgatataacaattccatgaatagccaaatcatatccagcaggtatcaaagcttttgtattaaacataaaatacattgataccagaagagcaataataactaaaataattccaaaaagacctatttttccgtatttcatacaaattccaccctatattaaaatatgataaataaccaaaggagctgaagatttcgataattcactttacaatcatcaagcaatgaccaacatcgaacctttgttggtgtaattgtcaacttaagcttcaagttagttatttttgtaattaaaaaataattgaaagccccataaataaggggcttttaatttatgtagttctatagtaattgaattaatcataccaaagttatttcaaaatttcaacttttgcttatgatgtttttatcatcgaaacaaaaatgtcttaattctaacgctgttcaaataaagtttcatataaaaaggaagtactactgttcgtaaatctatatagggagtggattccgacacggttttttatggagatggaaaattaattataaaaccgccagacaatgctggcggctttttgctgcttcgtttatttattaacagagatcgtaacgttatttcctgcaactgaaacctttgcgaaatcctgtgtatctaccacaggagtgacggctttattgtcgattgtgatgttgttaaaagatgtcgaaaaggttgctttgatcgcatcacgctggctttcatacgaaacagccgcggtagcaagggttttccattttgaaatcgtgccgatgttggttccttgaatttctgtgataatccgtccggtgtagccgtcattgttcgttccccaaagggtcatgcgcgtattgccgcttaaatttttatagattgtcatttggactgtgcttccagggcggaagcctttattgtatgtgaatttgtcttttccttcgatgtacgtttcttcatttttggacccaaccttcatgaggggcttccagacgttgtattgtttgctgtactgaagcccgatatcggcttcagttccgcttgttgccctaaagccagaataaatatagggagtagagaccgagtcgttgtttttgacagtttcaggaagcgtgattttagctgtaaaaatggcgcccgtactgttcaggtagacacggccgccgattccgttaggcagctgggatgctgcttttgcgacttgagcgtctgccgcgggtaaacctggtatacctgatgaaagggttccgaaaagaactgcagttcctactgcacctgcaatcaatacttttttcatcaaaattccccctttagatagtggtttcgccatttattatacctaattttggaactggattgatgtatataaatcgacaaaatatttcattttgagtgaagtaagggacgaaacgcttcgccaatctgaaagctatatacctttatcagaggaaagaatgagatcacaatcgttttaaccgatttgaaattttcctcaaaataaaagtacaaatgcttaaagaaacgattattaaaagaatgcccgctatcgtttcccagcctgtaaaaaagaggtgacgtttcatcaatgtctgtccttgtaaaatgataaaagcacagataccgactaagaaaagaaaacaaatacttaggattgctaacgctttacgtgagtatgttttcatttcatctttaaaatacagcaatacgaaaacaaagcagataacattggctattgtgcttatcacctcaaagcttttcatgacaactgatataaatagacaaagtaaaatgagataaaatacgatgtttctatacaaaaaacctctccttttatgtatgatcctcaaagagtttataaaagtttctttgtaactgcaataaactgaatgcgctcaattatgaactaactaaactatgtactaaatattcactattcattttcagattcagtcaccaaggttttcatagaaagggaagcttcagaaatatacatatagtgcacaaacaaaaaagacccggcaatagccgggggaaagtaaaaacgaggagatgttaatggcgtttagtagtgttttttatgctttttatactctacaacataatcatagtcttttttatcgtgatcataatattttttatcatagtcatcatattttttgtcgtaatcacagtcataatcttttttatcatgatggtcataatcttttttatcatattcgtaatacttcttataatacgtttttttgaccgtataatactcttctttgtattttttgtaataacccatatatactcctcctttatttttactacgctttattatacggcgagtagattttgcggcttggacagttaaaatcatagaaggaaaaaagggctgtccaaatgatagaaaaagacagatgacacaaaaacaaatcaaaataaagagccgatttttcatcggcccaaacgatttatcctacatttgtttgtcttcttttttttctgagtcattttttctgatatcctgagtcagtccgcttgttgcttgtttaaattctgataaggcttttcctgctgcacggccaagcgccggcagtttatcaggcccaaatactaaaaaacccacaaacaaaataacgagtatttttgtgaagcttaattccatatccttttccccctgattgaagtacaaccttttaaacaaattataagagatagcagtacaaatgggaatgcatttattttgaacattttaaaaccagacaaagacggattcataaaacggctgctgctgaatataatgtccaatgccacctgcctaagaagcagggaggaaggctggatcaattatgtagctctgccggaaatgatacaaacgtatctgcggctatcattgaaatagaggagtggtgtagctgatgagattcactaaggtagttggatttttgtctgttttagggttggctgcggtttttccattaacggcacaagcagaaaaagccggaactgcgggggctggagaatgggataagttggggacttacacatatacttactcaagtccgacggtatactcgaccggaggagattttagagtgtgcctttcaggaagcactcctttttctgtttcactgcacttatatgaggatgatcccggtgacaatcctgatgattatgtaggggcaaactatttttcacccggagaatgccacacctttggcagtattggaaaatttgtagatgggagcaataacaaggccgagttctttgttaccgattactctggtaaatctaaaactgttacgttttatgattgatggactcaaattgtgaagtataactcttgggaaaaataaaaaagagagagatacctctctcttttttattcttcgacagctttacgaagccgttcatttacaatgccagtccagccgccatccatcttaccgcgaacgacggagcttttctcgtttgctttgccgatcacttcattcggctctttccagccgctgtgaataagggtaaaccctgtcttttcccccaagtcttctaattgaaaggtaacgacccatccttctgtatcccattcaaaagaaagttcagttggagcttgaacagccaaaactttacaaggggacggcccaaacggcgattgtaagtgaaattcttgtccttctttgagctgaaagtcattgggcataaaccacttggcaatgccttctgaagtagagactgtctcccagactttctgaatgggagcctccagggtaatgctttttgtaatatccggtaatgcattttcgttgttttgagccatttcgtttacctcttgacatatgatgtttttttcaattcaatcatataataactaatatgatcatgtccatagcgtgcattatttatgctagagctgctgttcaacagcgtgtcagttgccagtctgatctgtgaatgggagaattctgcatgttcgagaaagagagagatgtgtatgttgtcatttcgttcatgcttgtttgctcagccgcaacagttatgtttgaactggaattcctgttcagccaatttattttgcgatttttgttttaatagtaaatgagccattttctaaaacaggaggttttttatgcttggaaaaatcaaagcagccattgataacagtccagggaagccggccagaattatagttagtgaaaaagcgtttcagcaattagaggaagaaatgcgctttgtttacgtttccaaaccgaaaacgataatggggattcctgtggaagtttcagaacaggcagaaagcttcaagctggaattttagtttatcccagactgctaaaaggctcattttatgataattatgcaaaatggtcaggttggtttctttaaaagcatgatgaaatgttcatcatgctttttttatcgagaaaaaagacgaacataaaaaataggtatacgggaaaaataatcctattagagagaggggaactgacagatggataacatgatatcaacacttactgactggaatgtgtggtttcaagtgttaattgtatttctcgttccatatgtaatctataaagtgtttacttggattcatgtataagaaggtgcaatgatgaggtggcggagcaatcagtacaaaacacagaagcagcatatatcaggtcattcaacagctgaaaaggatcaggatgtgttaaccggtaacatcggatacgatttagaacatgtaaaaagaaaaataggacataacggggacgttcacttccgtgagcttgaaatcactcatttacatgtaaaagcggtattgatctttgttgaaggaatgtctgatcaggaattgattaataaaggtctatcagtgttagttatgaatcaacctaatcaggtaagcgatgaaattcaatccggcaaaggtactttaacttcgaaacagataaaaaatcaaatcatatcaatcggtgatgtcatagaatcagagaaaatcagtgatatcgtgttgaatgtgttcatgggttcgacagcgcttctcatcgatggaataccgcaggcctttcttctgggaactgtaaaaaaacaaaatcgaagtatcgaggagccgctttcagaagcgcttgtcagaggaccgcgcacaggctttacagaagagttgagtacgaatacagctcttttgagacagcaaggaaaaaatgatcaattaacattgcagagatttgaagtaggaacacgattaaaaaaggatttaatcatcgcttatatgaatgacattgcagatccaaaagtagtcgaggaagtaagaaaaagagtgagagggattgagatcgatcatttgccggagtcaggttacgttgaacagttaattgaggataattatttgagcccgttcccgcaagtacagagtacagaacgtcctgatcgcgtcataagcggattaatggaaggaagagtagccattctgcttgacggcactccgtttgctttgattgttccagtcactttcagcatgatgcttcaatcgcctgaagattattatgaacggtggttcccgagctcgctcatcagattgctgaggttcatcgcagcaatgataacgttattcgcacccgctttatatatatcatttatttcttttcatcctgggttaattccgaccaagctggcgatttcaatttccgggacgcgccaaggtgttccgttcccatctctgattgaagccttatttatggaagtcgcgattgaaattttaagagaggcggggcttcgtttgccaaaaccgattggacccgcaataggcatagtgggcggattaatcatcggggaagcagctgtgcaggcggggattgtcagtccaatcatggtcattgttgttgcgctcacagcaatttcttcatttgccatcccgcattatagcacaggtatagcacttcggatgcttcggtttggcgcgatgttttgtgcggcggtgtttggattgtttggagtcattatgtattatctgctgctaagcagccatgtcgtaaagctaaagagctttggtgtgccatacgcaagtccggcagtgccctatcacttaaaagattggaaagactttgttatcagaatgcctcttttagtcatgaagcgccggcctaaaatgatgaatacagataatacaaaacgggtgaagtgatgaactcgacaggatggtgataaagtctcatgttcagcccaaccagtaaaatcacaaccgctcaggcaacgattatcatcattaattatatgcttgctgccggagttcttacgctccctcggacagtaacagaacaaacacaatctcctgatggatggatttcagttttattaggcggggtcctagcggtaatagccgggatgatgatagttaaattaagccagcagtatcctaaggagaccttttatgaatactcccgacatattgtaggaaaatggctcgggcatctgatcagtattgtttttattacttattttctggcactcggtgcatctgaagtcagagtcatgtccgaaatcgtggatttttttctcctcgaagggacaccgtcttgggccatcattatgacagttctttggattgggctttattcaattacacaaggcctagatccgattgcacggctttttgaaatgatttttccgattacggtcatcatctttttaacgatagccctcatgagtttaggcatatttgagatcaacaatttgcgccctgtattaggtgatggaatcatgccggttcttagaggtgtaaagacaacgaacctttcatttacatgttcagaaattatgttcattttagtagcatttatgaaaaagccgaaaaatgcggtgaaagcagttgtgatcgggacaagcgttgtgaccagtttttatatgattacgatgattatggtcatcggtgcactatcagttgagggagttgtgacgagaacatggccggggcttgacctgatgagaagttttgaaatacctggtttaatatttgaacggtttgaatcatttctgcttgtgatttggattatgcagctttttgccacgtttattatcactttttatgcagcttccctgggagtctcacaagtttttaaaaagaaacccctttcatgtatgtttgggctgcttcctgttatatatatcctctcttgcatgccgaaaaatgaaaatgacgtctttatattgggcgatacggtcagtcatatcgctttgtatatatttggcgctttgccgattttgctgttagtcatttcgaaatggaggaaaagaggtgaaaagtaaactaaaacgtcaattgcctgctatggtcatagtatgtctgctgatgatttgcgtaacaggatgctggagcagtcgggaaatagaagatctcggtctcacattcgctatcgcaattgataaaggaaaagaaacgaacactgaaaaagagttaaaagaagagggcgggagctatccgaaaaaagacaacattacgctgacctatcaatttgttaatgaaaaagcggcaggcgcgggcacaagcgggggaggcggtagcggacaaggagcgcaaaaagcgtacattaatataagtgaaacaggggattcattacagcagatcggaagtgaggttgcattaagacgggaccgagaagtgtttagcccgcatttaaaagttgttgtcatgagtgaagatgtgctgcacacatttcctatcgacgaaatgctggatcaattttttcgtgataatgaaatcaggctgagttgtcttgttttatctgctaaaggggaagcaagagacgctctccagctgaaagagaacggagaaatcccggcttttcggctgattggattaggtgaaaatgaacataaagtttccagaatacttccccctataacactcgcgaaactaattggaaaactgcattctggcagcagttttttactgcaaaatgtggttgcggcaaatggagcggtcaagtattccggagcagctgtaatcaacggaaaatcgaaaaaaatgatcggcactttaaatgaatatgaaactgaggggattacatggattagaggagaagggaaaggcggagttgtcaaaagtcatgataaaaagagccaacagacattagcgtacgatatcaataaaatcaaaagcaaaattcagccaatcgtaaaagggaaagatatttcattccatgtcgatattgaatcagaaggcgatttggttgaaaactggaacacaaaagaggcgttggacacccagtttatagatcgtctcgaaacgactattgaaaacgaggtaaagaaaatagttggtcaggtattaaaaaaaattcagcatgattataaagcagatgttgcgggttttgatgaatcttttagacttacatatcctcacttatggaaaagggtgaaaaataactgggatgacaccttcagtaaagccgacatcacatacagtgtgaacgtcacaattactcatttcggcacggttaaaactcagtaatgaatcccaaggaagagaaggaaacctctcttctcttttttatgcattttttaggatgaagatactttttttggagagatatacacttttcaaatcgaccaatatgctaatataggaattgcttgaaatagaagggacaaggggctgtgaggcagaaaccgatttatgtagaaatcgaaatgaaatctgatctggatacactctgggaatatacacaaaacccatcactgcataaggaatgggatctccggttttcaaatattacgtatttgaatagtcagccatgcgaaaaacagaagtttctttacgaaacaagggtaggctttggattaaaggtgtcaggtacaggagaaaccgtcggtgttttcaacaaatgttcatctgaaaggtcttcttcactggcttttggctctgatcatccattatctctgattcggcatggaagcggctactggaagtatatacagagagaaaatgggaaaatgacgtttttaacacagtatcaatacaaaacagcctacggactgccgggaagatggattgatcgtttattatttcggccgctgcttggctgggcgactgcctggagctttgatgcattaaggctttgggtagagcaaaataaacatccgaagcgcttcattcgatctgctatcatctatgtgttcatgtgtctgtttttcagcctgttttggttctatcaaggctttgcaggtgttaagacaagcatattggcaggaacagcggagataggcttagctattttgtggctgcttcctttaaaaagaaaatggatcattcatggtgtccaggcttgtatttttgctgggtttgcttgtctaggttccgaaatattcatgtgggttctgttgagtgtgttttccgctgcaagcggcgctcttagcctgcagctccccagtgccaggcgcacaaaacgaaagagaaagaagtgacattgtgagttcgatttatgaaaaatcaattattaactatcatttgctgcatcccaagctgcagaaacggtaccaattagacgggtctcatacattcagcgggacgggaacgatgtcagaaataagcggaggctcttttctggttagaatgctgttaaagctgggtgtttttttcagatgcttcttttcagaaagaggcaaagacattccatttacaatacaaaatagaacttgtcttttgaaatcgcaacatacaggaatagaatggaatcgtacatttttctttaaaggcaaaaaacgtttctttgatgcgttaatgatatatgacgagaaagaaaatagaatacttgatttcttcggcaaacctcatctgctgctgtctgttttgacgttcgaggcatctcatgacggctctcttacgatcacatcgggaaagcaatggctattaatatgcggaaaaagaatcccgctgccgaaatggctgaccggtacatccgtagtttgcgaaacgtttgatgaaaaaaagaattgtttcaccattgaagtgcatgtgcaaaatacaattcttggcactcttttcttttataaaggaacgtttcaggaggaagagagagaatcatgaaacgaaatggcatagtcagtgcgctttgttttattggatttcttgcagcagaagcaccggatatttcagtggcagaggcactcgttttgttatccattctatttttcgtgccgggaatttttccttttgtttttcgtcaatctccggttcgtgctgctcagtttatggaatatgggctaatccagtggtatccggcagccgcattctttgcggtgctggctctagtgacggaggttgggggtttcgcacttatctggtggatgtacacagtttttattgcattgtatgcgatcctccgcctttgggaaacaaagatacatagaatcgaagagacatcagttttgttcggccttatttatttggcgggaggaggattttggttttttgcttatgctgcccatttgcagatcatgcaatttggccctctcatcattttgctgactgctgtccactttcactattctgcttttctgatcccgatcttcaacggtttactcggcagaaccattagaaaacatcggatgttgtacagttggataacatgggtgatttttctttcgccccttcttatcgcactgggcatcacatattcaaaaacacttgatgtcattgcggttagcatttatatggcggcgatttatcttcatgcatttttggtgttcacggcagcttttcgcaccaagacggggacatttcttattcggctttcttccgctgttttaatgataacgattgctttctcgatgatttattcatttggtgtatttcggcaagaagttacattgaccatcaatcagatgatttggattcacggttttgtcaatgcgtttggtgttatcttgcccgctctcatagggtggagaatagaggatgcgaaaccttttgatgcagacagtgtaaagacattcagccgtatctacggaaaaagaaagattggagaagaatttttagctaacattcaagctgaaaataacgctcggtacagcggacttgtggatgatatgggcagcctgcgttcaaaagatttttcaccagaaaaactggagccgctcattctttcgttttatgaacaaaccatcgaatacaatattaaagcaaaagtaacatggagcacgtggtttcggccgcttgcaattatttacgaatggttcagcagaagaatcggccaaatacatctttcgacgaaccctgactggtataggatgtacagcaagataagaggtgttcattctaaaaaagacggaagggaaagagtacgtgcctggattagaacaaatgaaaaaaacgaaaccatttttaccgctctttattcagtgtatcgttcaaatggagaggggtatatgaatatttctttaccgcttccattcagcagcatgacaggtattttaaaaccatatcatcaccaggagaagctggttttaacaagcaggcggagaaaaagcagagcgggggatgagggaatttatctgcaaacaagagcgggaacttgtccgcttcctttatctgaaacctttctgatagaagctgcacatgacaacaaattaaccgctgttcatcatatgtggctgtttgaaataaaatttctaactgttcattacagcattacacatattaaccagcctattgaaagaacctaacacaaagaagaagcttcgtctgccagttgctgcatttcaaaattctgcaccgcatcaagacaggaaaggaagggtttatggtgttttatatcagtttatttctgattctttggctggctgcggggtttgcagtgggaatgaaacaagtgtatgtcgatcagctgtttgataaaactgtgatcgaaaggctggaaaaagaagcgaatgatcatggacaagctgaccggatgatcaaacagcgcgccctttatattgcagcagtgacattaagcgggtttatttctgtttattatgaaatgaaaacaatcccgcaaaggcgaaacataagaaaaattgaaaaaaacatcatgaaattaaatcaagtaaaaaaacgaagaatgaagagaaaataaaaatgcacaggccaaagggcaggtgcatttttgttttgtatggaaatgggggaggtggtgccagcttacttttcataaattcaaaaatgagaagaacagcgcccgggctaatggtatataatattgtgaatttaacaaaaatttaacaaggaggacgagagaattcgtgcttaagcctcaaagagacctacatcctgttgatttggacttagaggcggagtagatgaaaccggccaaagtatccctgctccgccgtttgctccattccttgaagcatgttgattgtaacatagccaaacgttttccatcaactattaaaattgtaaaattattgtttatttttatggtatttactccgatttcttcaatttctgctgaagatgtataccagaattttgaggaattaaaaaacaatgaagatccttctgattacgacgttgttacgaaagaaaacggaagccctgttcttgttttagccattcacggaggaggtattgaaggagggacaagtgaagtagcgagagagctcagcaaagagtactcgatgtatttatttgaaggcttaaaatcggcaggaaactcagtcctgcacattacgagcacgcactttgatgaacctcgggcccttaaaatgacgggaaatcatgaatatgtcatttcattacacgggtacgcagaagaagatcagcagatcgaagtcggcggtacagatcgcgtaagagcggcagatttagttgagaaattgcagcatgccggttttcctgctgtattgctcaatacggaccatccacatgcgggcgttagtccgaataacattgcaaataaatcaaaaacaggtttaagtatccagatagaaatgagcacaggctttcgaaagtctttgttcggcatcttttctttaaaaagcagagctgttactcaaaatgagaggttttataagtttacagaagtgatgttccgttttctcaaatatagctactgaaaaataggaggcgataagacagcctcctattctttatgcttctcattcgtttcgggaaacagctcgtccgcggcttccgtttgatactgcaacgtgttatctctcgctgacagttcatttcggaaattttcatcaagtacatttttcaataaataccgatgaaaaaagaattcaaaaacagtaagacaggcagcggaaaggagagctgctccaaatggtgagaaatcgtttcttgtttgggttaaaacaaatacccaaagaataacgaatgaaaggccaaagtcagccaatgaagctgtaatattgtttgttctgggtaagacgagcatgtcaccagaaagataggaaacaaaacctaagaaaagtgcaataaacatcacacttaagaaggatgcgtgatagactctgtccaaaatcacatataaaagggcgagagtgaaagcaatctttgaagcaagcgcaatgatatgtttcatttgaccacctaaattgttattttttgaagaaaattcttgggcgtaaacaaatgataaataatgcaattcaaaaccattcataatggtcatgttactattttaaacagtccgtttttgtttacactggtattttttttcagcagtatgaaactttcttatgaaaaaagacgtatatgtggatgatcagctttcaaggggggaatgatttgtggagataaaaggaatcaatcacttgctattttcagtttcgcatttggatacatcgattgatttttatcaaaaagtgtttgatgcaaagcttttggtaaagggaagaacaactgcatattttgacatgaacggcatctggctagcgcttaatgaagaaccagacatcccgagaaatgacattaagctttcttatacccatattgcttttacaattgaagatcatgaatttgaggaggtatcagctaaattaaaaagacttcatgtcaatattctgcctggcagagaacgagatgaacgcgatcgaaaatcaatttattttaccgaccctgacggccacaaatttgaattccataccggaacccttcaagacaggcttcgatattacaaacaagaaaaaacgcatatgcacttttatgatgaaacggccttttgacatcacacaccatatttcatataaggttaaatttaaagaagggtgttggtggagactttatgtttggagaaggtttctacccgattagttcaacgatgccatatcttttgaactgcacaagtgattccgtgaaggagaaattgaaatacatattacattttatatgaagaaagcgagctgttttaacagaaagatgaactaattagactgtgtactaaattttcagtatatttcaattacctcgccccttaataaatatgaaaccgtatccttccacgacctaaaaaatgaaacgtttttaagaagatggcgtctaatattttaaatgttcatattttgataaaagtttcctaaaggaaagaaaatttcttgacttcaacaatcttttggtggataattgtggtgtaaacatgatgttctttttcctcctattcaggctcgcacccaaaagtcagggcgagcctgctttttttgaacaacaaaccccctctccgtaaaggaagagggggttattttatgcatctgatagatcaatagattaatggacggttctgaacacgccaatcactttccctagaatgctgacattctgcaaaatgataggttccatcgttgggttctcaggctgcaagcgaatgtgggtatcctctttatagaatcgttttacagttgcttcatcatcttctgtcatcgcaactacaatttccccattgttcgctgtgttttgctgtttaacgatgacatagtccttatcgagaataccagcatctatcatactgtctcccataatctccagcataaatacatgctcgtctggaggaaccatgcggtctgggagcggaaaatattcttcaatattttctactgctgtaataggagatcccgccgtgactttcccgatgaccggcacattaacgacctggctttgcggaatgtctacttcttcatcaagaatttctattgctcttggttttgtcggatcccgtctgatcagcccttttgtttccaagcgggccaaatggccgtggacagtagagctggacgcaagcccgacagcctctccgatctctctcacggaaggcggatatccttttgatttaacctctgctttaataaaacggaggatatcaagttgcctttttgatagcttcgtcatttttcgcacctcaaaacgtcgattttaagaagattatagcatgattttccttacagtacaaacataggttcgaaaaaacaattgacagaaacgtttgttcgtatatactgaaattataaaaatgcgaacaaacattcctgttggaggttatgatcatgagtaaagaatctattatttttgtcggtctgttcacagtgattttgagcgcggttatccttatgctgtcatatacaagcagcggccaagagcttaatcagtatgttaaaatagaagtccagcaaggcgacacactctggtcaattgctgatcaggtagcagatacaaaaaagataaacaaaaatgattttattgaatgggtagctgataaaaatcaacttcaaacctctgatatccagccgggtgatgagttagtgatcccattgaaaaagaagcatcaggatgcatatgaattagcaactgtaaaatagagaggaaagagagataaaatgaaagcactcatttatgcccgtgtaagcacaaataaagaacagcaggaaacgtcattaaagcggcaggaggaggagcttacggccattgcagcggagaacggtatggaagtggtcaaagtgattttagaaaaagccagcggatatgaaatggatcgggatggtgtatttgagctgcttgatgagattaagaacgctggaattgatgtcattttggttcaggatgagacaaggctcggacggggaaacgcaaaaatcgcactgcttcattgtatttatagagaaggtgtgaaagtctatacaacggctcatagaggtgaactggagttatcggaggctgactcaatggtcttggaaatcgtcagcattgtggaagagtatcagcgaaagattcacaacatgaaaatcagacggggaatgaaacgtgcagtaaaaaacggttttaaaccgcaaaaaaacttaaaaaaccaacatgggaacagtggaaaagaaaaaatagaggtgccaatctctgagatcgtccgcctaagagcgaataaactgacgtttgctgaaatcgcggctaccctaagagggtttggctatgatgtctctaaagcaactgttcaccggcgttttcaggaatacatagagaatgaagagacagcagagtgaatcagttgtaaaactttttttgatctagtactatatagacaaaatgcaataaaggagtttaacatgatttcaaacgcgaaaattgccagaattaatgaacttgctgccaaagctaaagctggcgttattacagaagaagaaaaagccgaacagcaaaagctccgtcaagagtacttgaaaggttttcgttcttctatgaagaacacgttaaaaagtgtgaaaatcattgacccagaaggcaatgatgttacaccagaaaagctaaaaagagaacaaagaaataacaaacttcactaatataagaggaatacggcaatatcgtattcctcttttgcatatactataatcaaaactcttatgtgacaaaattcaacaagtttctctcaaatttaagctgaaacagttgagaaaaagtcgtcagacatttatgatgtaagggtacaacacataaggaaggggatttttatggatacaattgaaaagaaatcagttgctaccattcgcacactgtcaatagacgctattgaaaaagcaaattctggtcacccagggatgccgatgggagccgctccaatggcatacacgctgtggacaaaatttatgaacgtaagtccggcaaaccctggctggtttaaccgtgaccgttttgttttatctgctggacacgggtcagcactattatacagcatgcttcatttaagcgggtttgatcttagtattgaagatcttaagggattccgccagtggggcagcaaaacaccaggacatccggaattcggacatactgccggtgttgatgctacaacaggtccgcttggccaaggaattgccatggcagtcggtatggcaattgctgaacgccatttagcggaaacatacaaccgcgattcatttaacgtagtcgatcattatacatacagtatttgcggtgatggtgatttaatggaaggtatttcttctgaagccgcttcactcgcaggccatcttcagcttggccgtctgatcgtactatacgattctaatgacatctctcttgatggagacctcgaccgttcattctctgaaaacgtgaaacagcgttttgaagcaatgaattgggaagttctttatgttgaggatggaaacaatattgaagaattaacagcggctatcgaaaaagcacgccaaaatgaaaagaaacctacattaattgaagtgaaaactacaatcggattcggttcacctaaccgtgccggtacatccggtgttcacggtgcgccgcttggtaaagaggaaagcaaattaacaaaagaagcttacgcatggacatatgaagaagacttctacgttccgtcagaagtttatgagcatttcgctgcagctgttaaagaatcaggtgagaaaaaagaacaagaatggaatgctcaattcgctaaatataaagaagtttatcctgaacttgctgaacagcttgaactggcaatcaaaggagagcttccgaaggactgggatcaagaggttcctgtgtatgaaaaaggaagcagcctggcatcccgtgcatcttccggtgaagttctcaacggacttgcgaaaaaaattcctttctttgtcggaggttctgctgacctagcgggatcgaacaaaacgactattaaaaatgccggtgattttacagcggttgattactcaggcaaaaacttctggtttggtgtacgtgaatttgcgatgggtgcagccttaaacggtatggcgcttcatggcggtcttcgtgtattcggcggaactttctttgtcttctctgattacctgcgtcctgcgattcgccttgcagcgttaatgggccttcctgtgacatatgtcttcacacatgacagtattgcggttggtgaagacggtccgacgcacgagcctgttgaacagcttgcttcactccgtgcgatgcctaacctttctttgatccgtccagcagacggcaatgagacagcagcagcatggaagcttgcagtgcaaagcactgaccacccaacagcgctagtgcttacacgtcaaaaccttcctaccatcgatcaaacagctgaagaagcattggcaggagtagaaaaaggtgcatatgtcgtttctaaatctaaaaacgaaacacctgacgctcttctcattgcctccggatccgaggtaggtcttgcaattgaagcgcaggctgaattggcaaaagaaaatatcgatgtttctgttgtcagcatgccttcaatggaccgttttgagaaacaatctgatgaatacaaaaacgaagtccttcctgcagatgtgaaaaaacgtcttgcaattgaaatgggctcatcatttggatggggcaaatacacagggcttgaaggtgacgttctcggcatagaccgattcggtgcatctgctccaggtgaaaccatcattaacgaatacggcttctcagttccgaacgtagtgaatcgagttaaggcattaatcaataagtaagcttttgaaagaggatgagtcaaatcatcctctttttcttgtttatccgacaaaaatagtattggctgtttaacagtaatagacaattctttcttttcttcttttgtataatagagagcaaatgaaatgctgctggaaaaggggatgaaaagatggaacgtcactactatacgtacctgatcaaagaggaatttgccaatcactatttcggccgggaatcggttatgtttgagctgtttcaagactatcattggacaagccttgaaaagcagcagtatgaaatgacagagaaacagattcaatatattacacaaccaatcccgattttacatatgcatcagcggttaaaaatgaatttaaacaagacggattacaggcagctggattatatttatagaatagctttgccgaaagcaaaaggccacgcgacgtttatgatgaaggagcacatgatagaaattgtggcttcgggagattacgaggcagaaacgatattctttgaagtgttaagaaaagtaagcccttgctttttagcaatggatttcaattcgaagcgttacggatggctaaatccggtgaaagaaagaaattttgtctaaaaccgaagaaaaagagatgtaaatgttgtataatagcttttggtttagtacactttaaactagacaacatgaaggaggaaataaaatgactttatgggttggcatcctagtgggcgttgttgcattgctcataggtgttgcactcgggttttttattgctcgtaaatatatgatgagctacctgaaaaagaatccgcctattaatgaacaaatgttacgcatgatgatgatgcaaatgggaatgaaaccttctcaaaagaaaatcaatcaaatgatgaaagccatgaataatcaaacgaaataatacgtaaagattatgatatagagaaacatggttataaaataaaaaacccttatacgggttttttattttgcaatcattcatcacccgctactgctcgaaggcgctgcttttgatattgtatgagaagatggtcaagctcctgactgagctctatcgtaatatgagatgtcattccgttcgccatgacaatttgcagcagctctgctctttttttttcaatttcttttaatagatgctctctaatcacagggatgtatcctttcatacattagatcttcaaagtgaatgtttatattatatccatatttatactaattttcaaatgagaaggagtataatgtctcaatgtcaaattaaattatataagttttttctgaaaatagaaatccttcaagtgaaagtgttaaaaaaatgaaatgattttgtcataacttgaaggaatgtcaaatcatgaagggatgatgacatgggagacgtgaattattttttgacattcggtgcgggttttttatcctttatttcgccttgctgcctgccgctttacccagcttttttgtcatatattacaggggtcagcatggacgatgtaaaaacagaaaagctgctgctgcagaaaagaagcctgtttcatactttgtgttttttgcttggcttttcagtcatttttattgctttaggctatggaacatcttttattggcagcctgtttagggattatcacgatgcgattcggcaaattggcgcgttgcttattattttgttcggtttcattacactcggtgtgttccggcctgaggctatgatgaaagagcggagaatccattttaagcataaaccaagcgggtttttaggatcggtcttaatcggaatggcatttgcagctggatggacaccatgtaccggtccgatattaggtgctgttatcacacttgcaggcaccaatccgggctcagcggtgccatacatgatgttatatgtactcggtttcgcggtaccgtttcttttattgtctttttttatcacaaagctgaagtggataaggaagaaccagcttttcattatgaaagctggcggcgttttgatgattgtgattggtgtgctgttattctttaattggatgagcctgatcattattttgctgtcagatctttttggaggctttactggtttttgacggtaaattactttcgtactactactaatccttttgtttttggtacaataagactattatctgtggaaatcgattgttggaggggaatatgacaagagttttagttgtagacgacgccaagttcatgagagtgaaaatcagagagatcttggaagaggcaaattacataatcgcaggcgaagcggcggacggtgaacaagcagctgacctgtataaaaaactgcgcccggaccttgtgacaatggatattacaatgccggtgaaaaacggcataaaagcgcttcgtgatatcttaacctttgatcctaaagcgaaggtcatcatgtgcaccgccatgcgccagcaaagaattgtaacggaagcaattgagctgggggcaaaggattttattgttaagccgtttgaggaaacaaaagtgctggaagctgtaagccgcgttatgggacattaaagtcatttcttttcaaaatggttttttttattgttttggagtatagtatatagtatcaacactccgagaaacaaaggaatgataagtatgatgattatagtttcatcgattattgctgtgttaatggctgtagctgtgatggtggtcagaataaagtcctctgacaagcctgtttcaccaaaaaaaatcattctcccgccgatttttatgagtacgggagcgttaatgtttttatttccggtattttgggtaactggtgcagagtttttggaagcattcactttaggtgtgattttctctatttttctaatcaaaacttctaagttcgaaattaaaaataatgaaatttacatgaaacgctctaaagcatttgtttttatattagtcggtcttttggtgatcagaatcgtgatgaaatcgatcttgagcacatcaattgattatggtgcactgagcggaatgttttggattctggctttcggtatgattgtgccttggagaatcgccatgtatttatcatatcgaaaacttcataacgagctgcagtcatctaatattcaaatgaattaaaaaacctttcctcttgtcaggaaaggttttttatttgagaagggtctgataaggttccaaatcgatttttttgtcccgcagatgcctttttaagaaggtatggtctcttttaggagttgcgagaatatagcctttgatcataagttgctgatcaatctttgctaccttttcttttaatgcaagctcaccgattttgcctgcgattttagcttttgctgcatctctgaacagctctggcacgggcgcagtcaattcatctagaaactgtttgttttcatcgttccataaatgtctgctgttttcaatatagtaatcctgccaatcaagctctgatctgccgtcctcttttggtaaacgctttaaaaactttcgaaacatgaaaaaaccgccgattgataataagactaccatcatgatcacccaaaacagaataaaccataaaaaccatccttccagcatcaatcattcccccttattctaaccatattgtatacgaagagagattagaagaacacagtaaaaaaagaatagaaaaaagtgatagacgtctagtcaaaagagatagtagatcatattctattgtatagtgaatctgctatttggccatgggagagtcactagagggtatttgacgataaatggacggaaaaaaaagtcactttcataataggggatgaaagtgactttttatgtttagctgagaggaaattgaagagaaaaagaagagccatcttctgtttctttattgacggcgactgtgagtatttgattttcgcattcggcttgaatggttttgtcattaaaataaaaaggaagcatcatttgtttttcaaaagtctgtcctgacgatttgactgttaagatgaactcgcatccagaaagggtaactgttacttgtgtaggctgtaaaaaagtcagatccgcttctataatatactgctgacttgtttcatataaatcaataggcaatgtttcgtcgtaccaggcgaaggggtcttcaaaaaattgccgaagccattcatccatactatcgaaatcattcgcatcgttgcgttttgaatggttcatggaagcattcctccacatatcaaccttgctttacatcatatgcggtggattataaatgggtgaacgcataaaaaaacagacactaaggtctgcttttcttacatatcatggcttgagttgtgcttttgtcttgtatggtttcggttctttacttttttgcttccgcttagaggctcaggttggccgggattgtgtcctttaggggcgtttttatgcatatctttacttgtattcttattggtcataaaatgagaacctccttaaaagagttcggtgttattgattggtttttctttttttgttattttggcgttctgcttcagtcagtacaagctggtcgttttcaatatagccggcgcctttgccttggctttttgcgtcattcattccgttaatgacgtgattcgcttttcttttgaccatcattatcacctcaatcataatatggcttcttttattgtgttatatgagagagcgtaaacagtaaaaattaccggtacatttttctcataagtcgaacttattgtatttaataaaaacattgatatttacttatgtatgattttgttttaatatgaaattgtgagaaaattgtgatggaatgtaatgttcatctgagaatgatctgatctgaagggggattttggagaatggcaaacgagcaaaaaactgcagcaaaagacgttttccaagcgagaaaaacgtttactacaaatgggaaaacatatcattactactctttaaaagcgttagaagattcaggtataggaaaggtttcgaagcttccttattccatcaaagttcttttagaatcagtattgcgtcaagttgacggcttcgttatcaaaaaagaacacgtggaaaatttggcaaaatggggaactgccgaattaaaggatatcgacgttccgttcaaaccgtctcgtgttattttacaagacttcacaggggttccggcagtagtagatctggcttcactgcgtaaagcaatggcagctgtcggcggagatcctgataaaatcaaccctgaaattcctgttgatcttgttatcgaccactctgtacaggtagataaagcgggtacagaagatgcattagcagtaaatatggacttggaattcgaaagaaatgcagagcgctacaaatttttaagctgggcaaagaaagcgtttaacaattatcaggcagtaccgcctgcaacaggtattgtgcaccaggtcaaccttgagttcttggcaagtgttgtccatgccattgaagaagacggcgagcttgtaacgtatcctgatacgcttgtcggaacagactcacacacaacaatgattaacggtatcggtgttctcggctggggtgtcggtggaattgaagctgaagcgggaatgcttggacagccttcttacttcccagttccagaggtaatcggcgcgaaacttgtcggcaagcttccgaacggaacaacagctactgacttggcgttaaaagtaacacaagtgctgcgtgaaaaaggcgttgtcggtaaatttgttgaattcttcggaccgggaattgctgaactgccgcttgcagatcgcgcaacaattgcgaatatggctccggaatacggtgctacatgcggattcttcccagtagatgaagaagcgcttaactacctgcgcctgactggccgtgatcctgaacatattgatgttgttgaagcatactgcagaagcaatggcttgttttacactccagatgcggaagaccctcaatttactgatgtggttgaaattgacctgtctcaaattgaagcaaacttatcgggtccaaagcgtcctcaggatttgatcccgctatctgctatgcaggaaacgtttaaaaagcaattagtcagccctgcaggtaaccaaggattcggtttaaatgctgaggaagaaaataaagaaattaagtttaaactccttaacggcgaagaaacagttatgaaaacgggtgcgatcgccattgctgcgattacaagctgtacaaatacatcaaacccatacgttctgatcggcgccggactggtagcgaaaaaagcggttgagttagggcttaaggtgcctaattacgtgaaaacgtcacttgcaccgggttctaaagttgttacaggatatcttgtgaattcaggccttcttccatacatgaaagagcttggctttaacctcgttgggtacggctgtacaacatgtatcgggaactcaggtccgctttcaccggaaatcgaagaagcggttgcgaaaaatgatcttctgattacgtctgtcctttccggaaaccgtaactttgaaggacgtattcacccgcttgttaaaggcaactatcttgcttcaccgccgcttgttgtggcatatgcgctggctggaacggtaaacattaacttaaaaaccgatccaatcggtgtgggcaaggatggtcaaaacgtatactttaatgatatttggccgtcaatggacgaaatcaatgcacttgttaagcaaactgttacgccagagctattccgcaaagagtatgaaacagtatttgatgacaacaagcgctggaacgaaattgaaacaacagatgaagctttatataaatgggataacgattcaacttacatccaaaacccaccattctttgaagagatgtctgttgagccaggcaaggttgagccattaaaaggactgcgtgttgtcggtaaattcggcgattcagtcacaactgaccatatttctcctgcgggggcaatcggaaaagatacgcctgccggaaagtatttgcaagaaaaaggtgtttcacctcgtgactttaactcctacggctcccgccgtggaaaccatgaagtcatgatgagaggaacatttgccaacattcgcatcaaaaaccaaatcgcaccgggtacagaaggcggatttacgacgtactggccgactggtgaagtaacatccatctatgatgcatgcatgaaatacaaagaagataaaaccggtcttgtcgtattagcaggaaaagactatggtatgggatcttcacgtgactgggctgcaaaaggaacaaaccttctcggcatcagaacggtcattgcagagagcttcgaaagaattcacagaagcaatcttgtattcatgggtgtgctgccgcttcagtttaaacaaggtgaaaatgcggatacactcggcttaacgggtaaagaagtcatcgaggtagatgttgatgaaacagttcgtcctcgtgaccttgtgactgtaagagcaatcaatgaagacggcaatgtaacaacttttgaagcagtcgtccgctttgatagtgaagttgaaattgattactaccgccatggcggcatccttcaaatggtgcttcgtgaaaaaatgaagcagtcctgatgaatcaataggaagagaaggcatttcgctttctcttctttttataacacaatgtgctgcggaggtggcatatgctgaaaaaatggctcgcagggatcctgcttatcatgcttgccggttatacgggatggaatttatatcaaacatacagcaaaaaagaagtcggaattcaagaggggaaacaagcacctgatttttctttgaaaacgctgtcaggagagaaaagctctttacaggatgcaaaaggcaaaaaagtgctgctcaatttttgggcaacttggtgtaaaccgtgccgtcaggaaatgcctgcgatggaaaagctgcaaaaagagtacgccgacaaacttgcggttgttgcggtaaatttcacttcagctgagaaaagtgagaaacaggtccgagcgtttgctgatacgtatgatttaacattccccattctgattgataaaaaagggatcaatgctgactataacgtgatgtcatatccaacgacatatatcttagatgaaaaaggtgttatccaagacatacacgttggcaccatgacaaaaaaagaaatggaacaaaaactggatcttgattagattcagtttttttatgctcagatatgcttacaagttttcagaattggaaaaaataaaagaatatgcggaggtgagaagcgtgaagaagatgagaaaacgttcttttcatgagctcgtcatggaaaacaaaaaagagctgatgaccaatacagagtatttaaatcagcttgaggaaaagcttgaacagcgatttaagcaaaaataacctttaatttgtattcatgtttacccctccttttgagaaacctatctgttgaggagggataaacatgggaaacaacaagaaaaacggtcagcctcaatatgctccaagccacttgggtacaaagcctgtaaaatataaagccaataaaggggaaaaaatgcatgatacttcaggacagcggccgattatcatgcagacaaaaggcgagtagcgaaaattcgagtttatttctaggaggtacatccgaatgacaaagaaccaaaatcaatatcagcagcctaatcctgatgatcgctctgacaatgtggaaaaattgcaggatatggttcaaaatacaattgaaaatatagaagaagcagaagcatcaatggagtttgcttcaggagaagataaacagcgtatcaaagaaaaaaatgcaagacgcgaacagagcattgaagcgtttcgtaatgaaatacaggacgaatctgcagcgagacaaaacggataccgttcttaaaaaaccagggaaacctggtttttttctttctgatttgattatggtaaaatggggctaaattgacgttaagggagcagagtaatcttgcatgtatcaaaaaaagaaatagaagtgcgttatgcagaaacagatcaaatggggattgtctaccacgcaaattatcttgtgtggatggaggtcggcagaacggccttaattaaggacttaggctttttatatagtgatatggaaaaaagaggcgttctgtccccagtcgttgatatcaatatttcctataaaaagccgcttcattacggagaaaccgcggttgtacatacatggatagaggaatataacggatttaaaaccgtctatggttaccacatctataatccggccggtgagctttccatcaaagccacctcatctcatatttgtgtggataaagaaagctttaagccaattcaattccgcaaagcttttcctgattggcacacagcatatgaaaaggccaaaaaatagggaagtgaacgggatatggcgtttggtgtgaaacgggaggaacttaaccgatggaaacaagcagtgaaaagaggagaaatcgcatttttaacacattactggctggatgaccgatttccggaagcaaggactgtaacaaaagccggctgtgcagacattgataagctggttcagtggggggcggcgtacgggttaaaaaaagaatggatccataagaaaagtgaatttcctcacttcgatctgctgggggaaacacaaaaatatattttggaacaagaaaacctaaccgatcatcttatacgatttcatttgtaaaaaaagaacgcacatgatgtgcgttcttttttattggtattcaaaaaccggttcatcagcgtcttctgaatagctgacgagaaggtcgtggttatcaaagtaccataaatcactttcttcaataaagaaggtaatgccgtcagcttctgcagtgactccagcctcttgtggggcatctttcgctacaccgagagaaaaacccttttgaacgttgctgcagcctccatagcggacgaaaaagcgaacctggtctccgctttccaaatcgagttcttctttataccagttcaatgcgtcttcgttaattgtcatattcataacagaacacccctttgttcttcatttgaattttctctattataaacgtattaggctattctgtgtcaaaagagaagttttttaagcttataaccattttactttaggttctgttttattgataattcgtttaatgttcgctcggtgtctgtatatcacaaaaatagtgagcagggtaacgacaatcaataaatacgtatcatggacaaagaaactatatataacagtatagatccctgttaacatcgatgagagagaaacaaatttagtcaagtataaaaagatgaagaataccgcaaccatcgtgataaataacaggggtgcgtaaaatagcaaaacgcctcctgatgtcgccacggctttaccgcctttaaatttggcgaagatgggaaacacgtggcctaaaaccgcaaagactcctgcaagaagcgggtgaatatcaacatgcatgagaaaaggcaatgcagttgccagtgtccctttcaaaatatctccggctatgacgaccgaaccagcttttacacccaatgtacggaatgcattggtagcgcctaagttgccgcttccgtgctcccgaatatcaattcccttggcaagcttgcccacaattaagccagatggaatgctgcctatcaagtaggccaaaataatcaataaagcaattaacatctacatttctcctttttcaaattcccttctttttattttaacatgagatgtcatgatctgatgataagtttttttgtaaagtttgcttacaaatccaatcaaacatgcatcatattttgatttctcctgttttgatcgtgtaaaataagtaaaaaaggagtgacacacgatgcaaaacccttctaaagcggaaattaaagagattcttcaaagaagcaaacgtatagcggtagtagggctttcagaccgtccggatagaacatcacatatggtttcaaaagcaatgcaggacgcgggttatgaaattatccctgtgaacccgacaattgatgaggccctaggtgtcaaagccgtttcatctttaaaagagattgacggtccgattgacatcgtaaatgtattccggcgctcagaacagcttcctggagtggcggaagattttttagagacagatgcgccagtattttgggcacagcaagggctagttaatgaggaagcataccagatgctaaaagaaaaaggcagaacggttatcatggatctgtgcataaaagtggcacacgctgtaacaaaataggtgcagaactgcaaaaatccttgtaaattcaaggatttttgctttttaattttaagatattgtttgcgtattacggtgaaacagatacaataaagcttgaacagctttttttgaataccttgtccagctgggtttcggccgttcgatttgcgaaggtctgctgctttatatataataaacaaacatacgttcttatggtgtaaaaacagcactagccgatgttttgagaagaactgattcgttagctctatgttgcgattgcaaacatattggttataatgaggagtccaaggcagtactggctcgaggcgaggtttataaaaaatatcttatatacaaatgatgtgtaacactgaaaaagagaaagacaatgttagtttttgaaaggggtttgtacgtttggctagaaaacagcaatttgattacaacgaagatgccatacaggtgctcgaaggccttgaggctgtcaggaaaaggccgggtatgtatattggctctactgacgcgcggggtttgcaccacttggtttatgaaattgtagataactctgtcgacgaggtgcttgccggccatggagatcacataatcgtcaaaatacataaagacaatagtatttctgtacaggatagaggccgcggcatgccgaccggaatgcataagctcggcaaaccaacccctgaagtgattttaacggtgcttcatgccggaggaaaattcggccaaggcggctataagacaagcggcgggctccacggagttggtgcatcagtcgtgaatgctttatctgaatggctgacggttaccattgagcgggacggttttgtctatcagcagcgatttgaaaatggaggaaaaccggttacatctctcgaaaagatcggcaaaacaaaaaagacgggaactcttacacactttaagccagatccaacgatgttcagcacaaccacttataattttgaaacgctctctgagcgcttaagagagtctgcgtttttgttaaaaggactgaaaattgagctgattgatgaacgcaatgaccagcatgaggtcttttattatgaaaacggcatagaagcgtttgttgcttacttaaatgaagaaaaagacgtcttgtctgaagtggtctcgtttgagggtgagcatcattctatagaagtggactttgcgttccagtttaacgatggttattctgaaaatattttgtcgtttgtcaacaatgtcagaacaaaagacggcgggacgcatgagtcaggtgcaaaaactgcgatgacgcgtgcttttaatgaatatgcgcgaaaagtggctttgctgaaagaaaaggataagaaccttgaaggcaccgatataagggaagggctttcagccattatttctgtccgcattcctgaggagcttcttcaatttgagggacaaacaaaaggaaagctcggtaccagtgaagcaagatcagcagttgatgcgattgtttcagagcagcttgcttactttttagaggaaaatcgggacaccgcaacgcttcttgtcaaaaaagcaatcaaggcgagccaggcgcgcgaagcggcacgcaaagcccgtgaagaagcaagaagcggcaaaaaacgaaaaaaatcagaagcgactttaagcggaaagctgacgcctgcgggttcaagaaacccggcaaaaaatgaattgtatctcgttgagggagattcagcaggcgggtcagccaagcagggaagagaccgcagattccaagcggtactgcctttacgcggtaaagtcattaatacagaaaaagctaagcttgctgatatctttaaaaatgaagagatcaatacgatcattcatgcgatcggcgggggagtcggggcagatttctcaatagatgacatcaactacgacaaaatcatcattatgaccgatgccgatactgatggcgcccatattcaagtgctgcttcttacctttttctatcgctatatgaaaccgctcattgagcatggcaaggtgttcattgcgctgccacctttatataaggtcagtaaaggaagcgggaaaaaggaaatcattgaatatgcatggtctgatgaagagatgggtgatgtcctgaaaaaagtcggcaaaggctataccattcaacgatataagggtcttggagagatgaacgcagaccagctgtgggaaacgacgatgaatccggagtcccgcacacttgttagggtcaaaattgacgatgcggcacgtgtagaaagacgtgtgacgacgttaatgggagacaaagtagagccgcgcagaaagtggattgagaaaaacgtcgctttcggcttagatgaagaaagcaatattttagaaaatgaaaacttatcggtcgctgaggaggtttaatgattgtcacagccagaattatttcatgatttaccattagaagaggtgatcggcgaccgttttggacgctacagtaaatatattattcaagacagggcgctgcccgatgcgagagacggattaaagccggtacagcgcagaattctgtatgcaatgcatacagatggaaacacgtttgataaaaacttcagaaaagcggccaaaacggtcggtaacgtcatcggtaactatcatccgcacggtgacagctcggtttatgaagcaatggtgcggatgagccaggattggaaagttcgtaatgtgttaatcgaaatgcatggaaacaatggaagcatcgacggagatcccccggcagccatgcgttatacagaggcacgattatctccgattgcatctgagcttcttcgggatattgacaaaaacacggttgaatttgtgccgaacttcgatgatacaagcaaggagcctgtcgtactcccggcgatgtttcctaacctattggtcaacggatctaccgggatttcagcaggatacgcgaccgacattccccctcatcatctgggagaagtcattgatgctgtcattaagcgtattcaaatgccatcttgctctgttgatgaacttatggaagtcattaaagggcctgattttccgacaggcggtattattcagggcgttgacgggataagaaaagcttacgaaaccggaaaaggaaaaatcattatccgcggaaaggctgaaattgaaacaatcagaggcggacgagaacaaattgtcattactgaaattccatttgaagtaaataaagcaaaccttgtaaaaaaaatggacgagttccgtattgataaaaaggttgaaggcatctcagaggttcgtgatgaaacggatcgaacagggctgagagtggtcattgaactgaaaaaagaagctgatgccaaaggcattttgaatttcttatacaaaaatactgatttgcagatcacatataacttcaatatggtggctatccataaccgccgtccgatgctgatgagcctgccgtctattttggatgcatatatcggacaccaaaaggaagttgtcacaaaccggtccgtttatgagcttcaaaaagcaaaagacagacatcatatcgtagaagggctcatgaaagctttgtctattttagatgaagtgattgcaacaatccgttcttctagcgataaacgtgacgctaaaaacaatttgatcgcgaaatatgaatttacggagcctcaggctgaagccatcgtgtcattgcagctatatcgtttaaccaatacagatattacagcgcttaaggaagaggcagaagagctcggtaaaaaaattgaagagctcgaatctattctgagcaatgataaaaaactgctaaaagtgattacaaacagcttaaaagcattgaaaaagaaatatgcagatacgagacgctccgtgattgaagaaaaaattgaagaaattaaaatcaatctcgaagtcatggttgcatctgaggatgtatatgtaaccgttacgaaggatggttacctaaaacggacgagccagcgctcatttgccgcttccaacggtcaggacttcggaatgaaagatacggacaggatgctgcatcagtttgaaatgaatacgacagacgtgctgctgctctttacgaacaaaggaagctacatctattgtcctgttcaccagctgcctgatatcagatggaaggacatgggccagcatttttcaaatctgatcactattgaccgtgatgaaacgattgtaaaggccataccgataaaagaatttgatccgtcggcatatcttctattctttacgaaaaacgggatggtgaaaaagacagagctcacccattataaagcacagcgttattctaaggcgcttgtggccttaaatctgaagggtgaagatgaactgattgatgtacatgtaacaaatggggaaagccagatctttatggccactcacttagggtacggcctatggtttggagaagacgaagtgaatgtagttggcgcacgtgcggcaggtgtcaaagggattaacttaaaagaggatgactttgttgtctccggtgagatccttcagcaatctgattcaattgtcttgttcacacagcggggagcggtaaaacgcatgagtctttctgagttcgagaagacatcccgcgcaaaacgcggtgtcgtaatgctaagggaactgaaaaagaatcctcaccgtgttgtagcactgttcgcttgcggtcttgaacagcgactaatggcagaaacagaaaaaggcgacagaaaagaactgcaggcaaaagagttgcggacaaacgacagatacagcaatggctctttcttttttgatgaagaggaatcaggcaaggttacagctgtttggcgacttcatacagaacaataataaaaaacccgctcatatagtatgagcgggtttcgtttgttttttatcagctttcatggttggtgaatagatctgttacagcatgaatgacttcaatcccctgccatacaaataaattcagcgctgtgaaagaaaataagcctaaaatcaccattcttaagataaacaacatgtttaacagcctcctcatattttcgttacataatcgggtgatgttgaacatgaagtttgccgaaataagacgattgataaaatttggccagtataaagctttttttccgctgacgtctgcgggagtatcccgtacttttgctttcagcggtcagcagcagaacagccattgcccataaagcggtcagcgtaaatgcccctgtgatggatttcttctcatcatcagcattttggccgactttcatctcatgcatttcctgctggtcggctacggctttataatgatggccgatatcaaaggcgtggggaattgagaacaaatgaaaactggcaatcgccaagaataagatggatgctttcaatatcgttacttttttcaaatgatctccccctcctttaatattactgaatatttttataataataccccaatccatcctaaaagtaaacgtgatttattaaatttaaaaataaatttaaccttgttaagtatatatctttttgcttatttttgaaagagaaaacttcttttattagcgtatgtatacccggtttatggtgtgaataaaaacatattttaaatgatatgtttgttgtttagggtttattactttatttatgtgttaaatcaaagggaaaggcaagagaatgggaagaaatgattacattgttaatagggcactcttttttaaaagccagcttgcaaggaatgtttttattcgtaggaaaataatagagaaggggtcgacagagtaacatctggctacgacaatattcttctcgaaaaaacttcctaattcgtcatattgtgatataataaaactcgttatgttaaaaaatctaacatcaaaatcgaattcgtgttgaattgatgaaaacgggaggtaaatatggagtcttttttcaatagtttgattaatattccaagtgatttcatctggaaatacctattttatattttaatagggcttggattattttttaccatacgttttggttttatccaattccgttattttattgaaatgttcagaatagtaggggagaagccggaaggaaataaaggtgtttcatctatgcaggcattctttatttcggccgcatcccgagtcggcacagggaatttgactggtgtagccttagcaattgcgacaggcggaccaggcgctgtattttggatgtgggtagtagctgctgtaggtatggcttcaagttttgttgagagtacgttagcgcagctttataaggtgagagacggggaggatttccgcggaggcccggcctactacattcaaaaaggtcttggagccagatggcttggcatcgtttttgcaatcttaattaccgtctcattcggcttgatttttaacgctgttcaaacaaatacaattgctggagcattggatggcgcattccatgtgaataaaatagttgtagccatagttctggcggttttaactgcgtttatcattttcggcggtttaaaacgtgttgtcgctgtttcacagttaattgtgccggttatggcaggcatttatattcttatcgctttatttgttgtcatcacgaatattacggctttccctggcgttatcgctacaattgttaaaaatgctttaggttttgaacaagtcgtcggcggcggaataggcggcatcatcgttatcggtgcgcagcgcggacttttttcaaacgaagcaggaatgggaagcgcaccaaacgcggctgcgacggctcatgtatcccatccggcaaagcaaggctttattcaaacattaggcgtatttttcgatacatttatcatatgtacgtccacagcatttattattttgctgtacagtgtaacaccaaaaggcgacggcatccaagtaacacaggctgctcttaaccatcacattggaggctgggcgccgactttcatcgcagtcgcaatgttcttgtttgcattcagttcagttgtcggcaactattattatggcgagacaaacattgaatttattaaaacaagcaaaacatggctgaacatttaccgtatcgctgtaattgctatggttgtgtatggatctttatcaggcttccaaatcgtttgggatatggcggacctctttatgggtatcatggcgctgatcaacttaattgtgattacgctgctgtcaaacgttgcttacaaagtgtataaagattacgcgaaacaacgtaagcaaggacttgatcctgtgtttaaagcgaaaaacatcccagggctgaaaaacgctgaaacatgggaagatgagaaacaagaagtataatataaatataatgaaaaagctgcattcaatagttgaatgcagctttttcattattggaaataaatttaatttttcgactcgaatgaaaaatgacgtgtaaagtcccaattcagtccagttttctttgttctatatgtgtcatgtgtgtcttattcattggaggtagagcaaattgacaggcttttaaacctcccaaaaacaagaaattaggttgatagacaatcatgagaaagatttttacaatgagttcgtgctcataagaagtgtagagccaaaatgatgcgaaggaggaaaagatcagatatgaaacggtcaatctctatttttattacgtgtttattgattacgttattgacaatgggcggcatgatagcttcgccggcatcagcagcagggacaaaaacgccagtagccaagaatggccagcttagcataaaaggtacacagctcgttaaccgagacggtaaagcggtacagctgaaggggatcagttcacacggattgcaatggtatggagaatatgtcaataaagacagcttaaaatggctgagagatgattggggtatcaccgttttccgtgcagcgatgtatacggcagatggcggttatattgacaacccgtccgtgaaaaataaagtaaaagaagcggttgaagcggcaaaagagcttgggatatatgtcatcattgactggcatatcttaaatgacggtaatccaaaccaaaataaagagaaggcaaaagaattcttcaaggaaatgtcaagcctttacggaaacacgccaaacgtcatttatgaaattgcaaacgaaccaaacggtgatgtgaactggaagcgtgatattaaaccatatgcggaagaagtgatttcagttatccgcaaaaatgatccagacaacatcatcattgtcggaaccggtacatggagccaggatgtgaatgatgctgccgatgaccagctaaaagatgcaaacgttatgtacgcacttcatttttatgccggcacacacggccaatttttacgggataaagcaaactatgcactcagcaaaggagcacctatttttgtgacagagtggggaacaagcgacgcgtctggcaatggcggtgtattccttgatcaatcgagggaatggctgaaatatctcgacagcaagaccatcagctgggtgaactggaatctttctgataagcaggaatcatcctcagctttaaagccgggggcatctaaaacaggcggctggcggttgtcagatttatctgcttcaggaacattcgttagagaaaacattctcggcaccaaagattcgacgaaggacattcctgaaacgccatcaaaagataaacccacacaggaaaatggtatttctgtacagtacagagcaggggatgggagtatgaacagcaaccaaatccgtccgcagcttcaaataaaaaataacggcaataccacggttgatttaaaagatgtcactgcccgttactggtataaagcgaaaaacaaaggccaaaactttgactgtgactacgcgcagattggatgcggcaatgtgacacacaagtttgtgacgttgcataaaccaaagcaaggtgcagatacctatctggaacttggatttaaaaacggaacgttggcaccgggagcaagcacagggaatattcagctccgtcttcacaatgatgactggagcaattatgcacaaagcggcgattattcctttttcaaatcaaatacgtttaaaacaacgaaaaaaatcacattatatgatcaaagaaaactgatttggggaacagaaccaaattagttaagcttttttttggcggacatcagtaacgatgtccgtttttatcatctaataggaggtttgcgttgtggatgaaatactgaaacagtatatggtgctgtataaaaaaatgagtaatatgataaatggtcccgactatccaggtaaggaaaaagacatccagcatcaaaaagatcagatcgaagtttacgaaaaacagctgcagcaaggattttctacagattatgactatgatgtgtttgctgattctgttatcaaatgcgcatatggcgatatgacgctggaagatttagaagccgtttattatggattgacaacaccatttttttgatttgtcattcagcagtaaaatttcaatttctgtctcactaacttaagtatactttgatattgagacagaaatttatttattttgtttacttcctagaatatatattatgtaaactagaaaagatgaagattaaagctttgctgtttttatgtacatcctttcttcttcctgtaattcagcaacaaaataaaaaagcgatttcccaatcggaaaatcgccaattcagacactctattatttatgagtgtctttgtgctcttaacgatttacaacaaatgttgttacgctttgagctggaagatgggcccaaaaatgattgcctgatacagtgagattcgttccaggttgtagattgctgctgctgctcgtgatccatctagatacgtttgaagcagatccattctgcaaaacaaagttttggttgacccctgtgttgcttttattgatagcaacaataacgaccttgttgtcacctttataggctgacacgtaaacgttcgcattagggtttttcgttgcatcaatccttacatagccgggacgcacaaactttgagaaatgagccatattgtagccgcgtttgctgatcgtaccatcttctttcataggtccatatgatcttcgaatgtaccaccatacataagcttgaaagtccccctctaccatcgcattgtgaatatgctgtgaaacatccaatgcctcaggccatcgatccgccgagttgttatcactgtttggatagtatacttccgtcatccaaaggtccttccccgctcctttttgtttgaaaagaggataagggaattggctgacctgggtgccgtacaggtgagttccgagaatatccatattggcaagagcctgcggatcgttcaagatcgggtccgacaaattcttcaagtattgaaatgactcaggcgcaatgacgcgggcattgatcgagccggcgttttctctcataaagcgaagtatttcttgcggcgtccaccacgtccactcgtgagcgtaatcaggctcgttttggaccgaaatcgcgtaaagattcacaccattattcttcatgaaggtaacaaaatcgttaagatgctgcgcgtatgctgcgtacttgttgtatttcagccgcttagctgatgtgtcaccattccgattgaaggtctcaaccatatcacttggaggattccagggagatgcaaaaacgattgccccatgtttgaccgcactcttggcagtctccacctctttataccaattatttcgattttcatctacatgaattcttaagattgaaaatcctaactggttctgtccattgccaaaagcagtttctctttgagctgctgtaagatccccagcccaagcgggatgattcatccctccaaaaccgcgaatcacttgtttctctgcagatacattaactgttacatcactggctgccaaaacttcagtagcgcctggccctaacatgactgacagcatagtgaaacatactaatagtacacaaattgttttttttatgcgtggaatcatttattcctctccttcgtcatgtgtcttttacggtattaaaaaatctgcatggcatatccataatggcgggctgttccggtgatggcccgtacttcacccgcctcgtttttaagcggtcccattacgagtcctatctttgcgtaaactgccagtaatcaaaattaaacaagtttcctgtacctgttccggtaaatacaaagaatactttgtgcacaccggttgccccgcttacttcagtttctatttctctccacgtttgcgctccacctgtggaaggtacattcagagttccaacaagcttaccatcagcactgtcgaggcgcacttctatttttccgcctaaagtggatgctacatttgctttaaatgtcctggcaccgcccgctccgaagtctgcatttcctacagcaatccagtctccattttgaatgcttgttacatgctgattatttactggcccgccgggtgctgtggacttctctgtcaaaatgcgtccattccaagcaaacgtttcagcttctacccggttataaggattcaaattggaaagctgtgttacacctgcataatttgctgctacctcttggatggatccatctgggttatgcaccagcttattaatatggggagaacggtatcctttgccggccccgaacagagcggaactgacagtttgcgcatggtacaccacataccactcgtttttaaaattgaaaacagcatgatggttgtttccgccgcctccgaaaaatgcacccggatttttcaggaagtgccctctatatgtaaaggggcccatgggacttgaactggtcatgtagccgatctcacccgggggtttatcggccggatgtgtgccgccgaaattgatgcaataggagtaataatatgttccgttatacttgtgcaatccggaatcttcaaacatgaaaggcgcatcaattgtagatgcacttccctcaacactcgtcatatcaggccctaattttatgacccttgccgttttaggattggcccattgtccctgcgttggatttgaaccgccaggaacgcctccgccggcatacaggtaaccggttccgtcgtcatctacaaatactgccggatcaaaaagccatacaacacctgacattcctggcgtacttggcgttacgagcggttttccgattgggtcggtccatggaccaatcgggctgtctgcggtgagaaccccgatacctccgccgctgtttgcgaaataaaggaagaatttatccttgccattaatttttttaactgcgattgacggtgcccaggatgcacctgcccattttgcaattccacggcctccattagctccattggcacctgctaccggaatggctccgtggtctgtccagttcaccatatccgctgaagatatgacgaatactctattcaaattggcaaatgaattatctttaatcgttccgttgctattatattcatagtcatcacttgacatataaatgtagactcttccgttataggtcagcgcaatcggatctgctcctaaatgatggtcgataagcgggtttgaattccctatatgttttgcaattgtagtacttgtggcagcatacgcagacttcccagataagcagctcaataataaaactagaatccataaacatacgctacactttttcctcatcacttcacatcctcctttttctttaaaatgggggattttcttttggaatttgatgacaacaggtcacgaagattgcacgcataaagtagccggaagctgtttagcaatgttcccagttgttctgaaagctcatcttcatgtgtctccattctctcttttcttcgaggagatcgcaccactccttcaaaattgttcaaaaaaactttcccattcctagcgaccattgtccagaaaataaaaagacaggattgttcatggcctcccactaatcacattgaacggagattacatcattatccaagatatccctttatctaacatcctacatcattaaaaaaattgtgtatagaaacttttggaggagttagtgttcgattctacaaaggaactggatacatttattcattgataagatggggctaacactccttttatatttttatgtaaagatagttttcagacacaaaaaaacagccgtcaatgcggctgttttttcaagagtataagaactattgagcggtatacccgctttttcatgttttgttcatattttattaattgtttattcaacactgtccgctatagtaatccatatcaacaaatatgactgccactcgcatcttttatgaagggaggttcgttacgctgaaagaaaaaataaagacattaggccgtttttgcaccgtaggcgtcggcaatacgctgatagattttggtgtcttctttcttcttaccgcttgtcatgtctcttatctgccggcgcagatctgctcctatactgcaggtatcgtcaacagctatgtgtggaaccggaattggacgttttgtgtgaaaggtaaggctgacgggaaagagatcgtgcgttttctcatgattaatattgccgcgtcggggatcacctttttgctgctttatttgtttcaaaattgcggctgctcgcttttggtgagtaagctcgccgccactatcggcggaatgatgatgaattttatcggaaaccgaatctgggtatttggagattcgctgaaaaacatacaggatcaggagtgaagatgaatgagaaaaaaagtgagaaaagcggttatacccgcagcgggtttaggaacgagatttctgccggcgacaaaggcgcagcctaaagaaatgctcccaatcgtcgacaaaccagcaatccaatatattgtagaagaggccgcagagtcaggaattgaagatatactgattattacagggagaaacaaacgctcgattgaagatcattttgatcggtcggcggaattggaattcaatctccgggaaaaaggcaagacggagacacttaaggaaatgcagcagattgccgatttggccaacattcattacatccgccagaaagaaccgctcggattaggccatgcggtgctgtgtgcggagcattttatcggagatgagccttttgccgttctcttaggtgatgatattatggtgtctgaaacaccggctcttcggcaattaatggatgtatatgacgtttatggcacagaggttgtcggtgtacagtcagttctccctgaggatgtcagcaaatatggtattataaatacatcagggtctcaagggcatgtatacgaagtgaacgatttagtggaaaagccttctcctgaagaagcaccttcggaaatcgcagtaatgggacgttatgtgctgaattcttcgatcttctccgttttgaagacaattggcagaggcgcgggcaacgaaattcagctgacagatgcgcttcgtgaggtttgccgtaaggagccgatccatgcccggctgctggaaggaaatcgatatgacattggcgataagctgggctgttttaaagcgagcaccgaaatcggcttaatgcgtcccgaaatgagatctcagcttttggcctatttagaagatgtgatcaaacgggaaacgaaagaaatgctgcggtaaaaaaattgtaaccatcttgctcgtcaatcagtcatataatagtgaaaaagattaggacaggttgtgaagaatgtgggcagtttgataagcgaaattttaacatggctgacgaacatgggatatgcgggtattgcgattgggttaatgattgaaatcattccgagtgagattgtattagcttatggcggctatatggtatcggagggcacgattggatttattggcgcaattattgcgggtgttatcgggggcaccattgcccagatctttatttactggatcggtcgctatggcggcaggccatttctggacaaatacgggaagtatttattgattaaaaagcatcatatcgatatgtcggaaaactggtttcagaaatacggcgccggagttgtcttctcggctcgttttataccggttgtcagacatgccatatccattccggcaggtattgccagaatgccttttctcaaatttgtggtactgactgtgcttgctatcattccatggtctatcctgtttgtttatttaggcatacagctaggaagccagtgggatgatgttgagaatatagcaggcacttatacaacaccgattatgatattggctgttgtcgtgatagccctttattttgtgattaagaaacgtacagccatatttaaacgatagctagcggatatgcataggggtgactgacgctcccctatgcatatttttttacttgcgatgttgatttgccagcttcagattctccgctaaaaatgcgacaaacacttcatcccgcacgagcgatgcggcataatttctcttaataaaccattctgcctcttcaaacgctgcgaatgtttcgtcttgggtttctccgttaatttgaatattccattcgttgtctaaagggaaaagaaaaaatctcatttgtgcgcgattttcatataatgatccattcgcagatccctttagattatagatgttacggaaggcatccggccgtacaggatcaatacggaaagcttcagctacaaacaactcgtatacttcatcggttattgaacagccggacgcttttgcatgccctccgccgccatatcggccggcgatttctgacacatcgatgtaatcatgaatggtgcggagactgactcgttttgaccccatgctcaaaatcgcaatgtaatcgaggtgcgggttatctttccctagcctgttccccagctctgaatggtacgattcagcgtgaacgatgcctacacagtgttcgtgaacaaaggtttgtaccatttcccttttctttctgcggaggtagcgctcgattttttcgtcttctaaatcaagcagtttttcttcaaaatcatcgaagaaaaattcgtcatgcgtggaaaggcgctggatcatttttgcttcaaattcatcgattgacagcaaaaagaaaagatcattaagccgcttcgcctgtttttgatcgtaccgctcccactcccatgtatcgtattggcggacgagctctgtgaattgatctaaggcgtttgtcggtttcatgaagccattttcaacgagatagccatataaaagcgatgtcgcggatgtgagccttccatcatcgtattccacctggacaaatccccattcatgctcattcaaatgaagggctgttttatgatggtctatgagcttcactttgccccctgcatgaacatactcattcaatctctcttcgttttcttcattgacggcgagatcggtgatgaataacgcgtcctgtctgttgctctccttcgctttttctaaaaagtactgcacctgtgcgtttaagccgttgacagagttataccggacctctacgtcttttccgaacgccaattttgctacgattccgcatcctactccgtccaagtcgttatgtgaatataaatgatacacaatgtaggcccctttttatgataaactgacaattgccgctagaggtgcggcagcctttatttactattctaaaaaaccaagcgttttatgcaatggtaattagttgacataatgttgttattgtaaatatacaaaggagcgctttttttgcgctcctaagttcttgcttttacaccggataaaccggatgctttcgattggtaaatgtcatttcctttgtcatgtatgccttgagccgtttggccagctcatcacgcagcgaattggctgggataacagcatcaatgatcatttctgaagccagacggtagatattgatgtcctctttgtattcctcccgtttgctgctgataaatgcggctctctcttcttctggcagctcggcgatttttttagcgtagacagcgtttacagcggcctcagggcccatgacggcgatttgggcggttgggagcgctagacagcaatccggttcaaatgccggccctgccattgcatacaaccccgccccgtacgcttttcggacaatgacagagagctttggaacagttgcctccgacatcgcagaaatcattttcgccccgtgtctgataatcccagcctgttctacttttgtgccaatcataaaaccggggatatcggctaagaacagcaatgggatatgaaaagcgtcacataaggtaataaacttagccgctttgtctgctgaatcgtggaataagacgcctccttttaccttcggctggtttgcaacaatgccgacaggctgtccgtggattcgtgcgaggcccgtcaataattccggtgcaaataaggctttgatctcaaaaaatgagtcttcatctatgacccgctcaatcagctcatgcatatcaaaaggtccgttttgattttgcggaatgacgtcggcaagcggagttttgaagtgttttggcgggcgtttctcatgaatgggcgctttttcttgaaaatttgccggaaagtaagacaaataagcccgcgccagctgtatggcttcttcttcagtttctgcaagaatatctccgcagccggagattgagcaatgcatacgggcgccacccatttcttcaagagacactttttctccaataaccatttccgccatccttggcgagcctaaatacatggaggcgttaccgtctaccataacgacgatatcacagaaggccggaatataagcgccacctgccgcagatggtccgaaaagcagacagatttgcggaatgcgtcccgataatttgacttgattgtaaaaaattcttcctgcaccgcgtctccctggaaagacattgatttggtcggtaattcgggcgcctgccgaatcgactaaataaatgagcggacagtttaatttttcggcggtttcttgaattctgatgattttttcaactgtttttgctccccatgaccccgctttcactgttgaatcattcgccatgacgcaaacggtttggccgccgattttgccgatagcggttacaactccgtcagcgggaagcccgtctgacatacattccgcaaaaaaagcgtcttctagctcaatgtcatcgtcaaagagaagggaaagccgctctctgacaaagagcttgcctttttcccgattgctttgatgatacttttccgctccgccttttcgaatccgttcagcccgttctgttcgttccttttcataatccatcagcattgcctcccttttatattcccttgtatacggcccgtcttttttcttgaaaggcctgaagcccttctctcctgtcttttgtcgggatggtttgttcatacgctttttgttcaatcgcaaggcctgtagcgagatctgtctccaatcctttattgattgcaaatttagcctgacggacagcgatcggtccgttggcagaaatggctgcggccagttcctctgcttttggcataaggtcacaaggagccgtgacatgctctacaaggccgatttcttttgcttcgtgtgcggtcacgcgtctgcctgtataaatgaattcttttgcttttcctctgccaatcagccggggcagcctttgggtccctccagcgcccgggataatagctaaccctgtttccggaagtcccagcacagctgattcagttgcgattcgaaggtcgcatgccaatgccaattctagtccgccgcctaatgcgcttccatttatcgcagctatgaccggctgcggcaaggcatcaagtaaagccgccgttctttgaatgagagatacactttccagaacctgatcttctttcagttttatccgttcctttaggtctgcccctgcacaaaacgctttttcaccggtgcctgtgaggatgacgcaacggatgtttgagttaaattcaatttcctggataatcatttgcaggtttctaagcatttccgctgaaagagcatttgctgcctgaggcctgtttaaggtgatcaacgcaatatgttcatttttaacagtaaaaagaatagaatctcccattgtatgcgtcctcccttttatcaagatgatttaaacacctgtaaatttctgctcggcagcggtttgcccattttttcttcaatccatttggccgcagatagcagtttttcgagctttacatttgttttgatatccatctgttcaagcatgtacacgatatcctcagttgcggcgtttcctgatgaacctggcgcatatgggcatcccccaagcccgcctgccgagccgtcgaacaccgtgatgcccatttggagtgctgtgaccatgttggccagagcggttcctctcgtatcatgaaaatgcagggcaatttgattagccgggaatcgtgccaaaagagcttcaagtacagtttccacttgggcgggattagctgctccaatcgtatctccaagcgacagttcagaaatcccaaattcaaatagagcttctgaaaggcgaatgacttgttcaatggggacatctttttcgtacggacagccgaaaacagtcgagaggtaggctcttgttgtgaggtttgctttttgtgcgtcgttgtttacttgtttgagtatatgaagggattcagaagtggatttattgatgttttttctgttgtgcgtctcgctggcggacataaaaacgcaagcctcgttaatgcctccttcaagtgcattctccagtcctctttgattcgggacaagtgccgcgtacgttacccctttttctcggtcgatgccttttgctacatcgatagcatctcgaagcgccggaatccatttcgggtgaacgaaggatgtgatttcaatatacgacagccctgtccgggaaagctggttgatccaggttattttatcctctgttgcgatccaaacgggctcgttttgtaagccatcacgcgggccgacttctttgattgtcacttttttaggatatggcatggtcttcctccaaattattgagtggaattgctcagttcgagcagtacgtctccttcatttacaaagtcgccttccttttttttgacttcttttacgattccgcttctatctgcaacgatcgggatttccattttcatcgattccaaaatggctacctcctggcccttttcgatttggtcgccggctttgacgtggactttccacaggtttcctgccatttgtatgctaaccgtcatgacaactgcctcctttataggtgttgtttcaaaaagtcagtcgtgacatccccttctttaaatgcctttgttgccgcagcctgtatgagaagcggaagatttgttttgattccttctacatggtagtcgcgaagcgctgtctccagtttttcaattgcttctgttctggactggcctttgacgatcatcttagcgatcatcgggtcataaaaaggggtaacaatgctgtcttttgctaccgcacattcgtgtctgactcctttatggtcagggagtgagaacgcagtgatcgtgcctggtgacgggtagaaggtcttggggtcttccgcgtatattctcacctctatcgcatgcccgtttcgtttgatgtctttttgagagaatgtgagtgtatggcccgcagcaattcgcagctgctgctcaactaagtccaggcctgttatttcttcagtcacggggtgttcaacttgcagtctcgtattcatttcgaggaaataaaaattttgcgtttggtcaactataaattcgatggtgcctgcgttcgtatagccgattgccttcgctgcttttaccgctgtttgcccgatcttcattcttagttcatcgtctacaaatggagacggtgcttcttcaatgactttttggtggcgcctctgaacagagcaatcacgttcaaacagatgtactgtatggccgtgttgatcggccaaaagctgaacctcgatgtgacgcgcatgttcaataactttttctatatacatcgacccgtcaccgaaaaaatctgctgcgcgctttttgtttccctcgtacgctttttttaatgcttcttcattttcaacacgctgcattccgatgccccctccgcccgctgaagctttcagcatgacaggatagccgatttgacctgcggtgcggcaggctgcctctatatctccgagggattcagaaacgcccggcaccacagggacaccagcagcctccattgcttttcgcgcttcaattttgctgcccatctttgcgatgatatcaggggaaggtccgataaacacgatgttttcttgcttgcagcgttcagcgaaccggctgttttctgataacaatccatatccagggtggatcgcgtcggcatttgcttttttcgccgtctttatgattctctctatatttaaataactttcactgactctcgattctccgatcaaataagcctctgtagcggcttttgtatggggcgcgtccttgtctgcttctgaataaaccgcgaccgttttaatgccgagacggctgcatgttcggataattctcattgcaatttctccgcggttggcgatcagtacttttgtaaacatgatttcacctcattgacttgatgataggttgaacatttcaatcgttttttctcgcagtttatatttttgaattttgcctgaggccgtcatcggatagtcatccgtaaaaataacataacgcggaattttgtggcgggcgattttccctttgcaataggctttaagctcatcaggtgaaacgcttttcccgtctttcagtttaatccaggctgcagcttcttccccgaatttggcgtcaggcacaccaacgacctgtacatctaaaacagcgggatgccggtataaaaattcttcaatttcccgcggataaatgttctcgccgcctctgatgagcatatcttttaatcttccagtgatgcggcagtacccgtcttcatccatgacagcaagatctcctgtaaacagccatccgtcatgattgattgcttttctggtcgcttctttgtctttataatagcctttcatgacgtgatagccacgggtgcacagttctccctgcatgcctctttgaacttcttgacatgtcccgggttctacaattttcacctcagtatgtggcagggcacggccggttgtttcgactcttcttatgaaggaatcatttgctctcgtttgtgtaatgactggcgaggcttcggtttgtccataggcgatcgtaatgtctttcatgcccatcctttcaatcacagctttcatcacttcacttggacagggagagccggccatgattcctgttcggagcgtcgatagatcatatgcatcaaaatccggatgatgcagctcggcgataaacatggtaggcacaccatggagcgctgtgcatttctctttttctaccgttttaaggacggtaacgggatcaaattcttgcacgggtatcatggctgccccgacggatacacatgccaaaaccccaaggacgcatccaaagcagtgaaaaaacggaacagggatgcacatgcggtcttgagaggttaaagccatacattcagcgatattagcagcgttattgatgacattgaaatgggtcagcatcacgccttttggaaaccctgtcgttcctgatgtgtattgcatattaatcacattgtctttatccaggctgttcattctctcttcaagctcagcatctgtcactgttttcgccaatatctctgtatcgtcccaatgatacatgccagacaatcgtttattgccaatatagatcagcgtttttaaaaagggatagcgttcagatttcagttggccgggctttgcttcttgcagttctggaattaaactgttcacgatgtctggataagaagtgcccctgtatgaatccatgataataagcgccgcggcatccgattgctttaacaagtaatcaagctcgtgtgcttgataattggtattgacggtcacgagcacggctccgatcttcgcagttgcgaactggacggcaagccattcagagatattagaagcccatatggcgacgtggtctccttttccaatccccatccgcatgagacctttagcggtttgacggcacagactgtcaaattgagcgtacgtatagcggatatttcggtctggatacacaacagcatctcgatcgggatacgcatcagctgtttgttccagcagcctgccgattgtggaatggatgagttcagccattcattgttcctcctttcttaatgataggaaagcgtttacatttttattttaaaagctgtctggcgatcacgagacgctgaatttcagatgtgccttcaccgatttccattaattttgcgtcccgcagcatccgttccaccccatactctttcatatagcctgaacctccatggatttgaatggcttgattgcaagctcttgtcgccatttcagatgcgaatagcttggcgtacgccgcttctttggtgaacgggcggttatgatctttcagccaggcggcttttaacaccatttgccgtgccagatcaatttccatcgccatgtcagcaagcttaaattgaatcgcttgaaatgaagaaatcggctgtccaaactgctttcgttctttcgcatatgccaatgatgcgtcaagggccgcttgagcaatgccgactgcaagagcagcgatggagatgcgaccaccgtccagcgtatatagaaactgtttaaacccttttgttggatcgccgagtaagttggccgcaggcactcttacatcctcaagcaaaatttccgctgtattcgaaccgcggacgcccattttatcgtacgggctcgtaatcgtaagtcctggtgtgtcagttggcacgattaatgcggagatgatgttttttccatctttgtttttgcctgttactgcagtcacaataactgtgcgtgcgtagcttgcattagtgatccagcacttttcgccgttgattacatactcgtcaccatttgaaatcgcttttgtttgagtgcctcctgcatctgagcctgcatttggctccgtcaggccgaatgatccgagtgctgtgcctgaagccagcggcgtcaaatgcgtccgtttttgctcttctgttccgaagtagtatagagggcttgcgcctagcgagaccgctgcagcatagcttaatccagtactgccgcaggctttgccgacttcttcaaccgctaaggcatatgaaatcgtatcaccgccagatccgccgtattcttctggaaatggaatacccatcagaccgagttcacccatttttttaaatgtttgcatcgggaactcgcctgtttgatctacatgttcagcgtgaggagcaatttcttttttcgcaaaatcttttaccatttcacgcaccatttgttgttcttttgtcagctcaaaattcacatcgtttcctccttcacatctttgtaacatcctattaggcgagttctataatcattccctgacaagaaaagtctgaaaattaaaactgaatcattttttatgtgataatatcagcgggatgagcaaatacatgcagtaggcgcataccatccatatcgtaaacgcaataacttggccctttgataaagccgggaagatgaggggaagattccaaagggaaatcgtatccatcaataaaccgaccgctgatccccatatacctagcttgatcaccgcgaactgtgattgatcgagtttttgatagagaaagaacacaaggcataaaacaagagcagtgcccgctcccaagagaagaaagttcggcaaaaaggcttcttcagccggatcagtcaacacagcatctccgaacagcacaaaaaataatgtggcacctaaccagactagaaatgaaaacgtaaaacacgtcctgtacgtgtttctcttcgattttacttagtactagtttctcagattccaataatggaaaatgtccaaacaccgcctccatattcatgtgaatctcacctttgttttttaaaaaaatacagcggtttaccatcgtttcctgtctccaaaatcactaaaaaagacgacttagaaagccgtccttctcatttcttattttgttgttcgtttggaagctttgctttcgttatgaagccggtctgctgaagtgacataatacgtatatttcttgttgggatctgccgtgttatctaagaaggtttgctgctcatgtgtttttctttgcgttgccagcaatgttctctgctttttcccttcggctctgtatatcgcataataggctgtttctttcgttttttgatttgatgggtgatctttaatctgcagaagattgccgtttttgtcttcggtgactttcgtaagcttcggtttttttggggcggtattgtcaagccaaggcatttgcggaaccagtgccggcttgctgtaaaggtcggcgataagcctgtctttgatgccaagcggatttttgttgagatccttgaggctgaaatgcatgcttcctttcaccagttcaagctggcggttcaaagtgatttgccgcacatattcctcagggtcggaccaaggcggatcaaaattgttattgattttatatgctgcctggccaatatataagtgaacaggcctatttttgacttcattgctccaccaatcagccagcacgtcgtacgccgctgcgttaaagccgatactccaataaatttgcggagcaatataatcgatgtcgccttcttggatccaatgtcttgtgtctgcatatagatcgtcataatttctgacgcctgcttttgtattcgatccggtcgggtcatctgctgcgtttctccatactccaaagggactgatgccgaatttgacatacggttttgcagctttaattgtttggttgatttgtttgacaagctggttcacattgtcccgccgccagtcatcgatattagaaaaagcgtcttttccgtattgttcgtactgtgcttgatcaggaaattcctgtcctgctattttataagggtaaaaataatcatccatatgaacagcatcgatatcataatgttttacgacttcttcaatgcctttgacgataaaatctctcgcttctggaatgcctggatgataatacagctggtttccataggcggcaacccaatctggatgttttcttgccgggtgatcctcagacaatttattaagatctgtatgattcattgtaatacggtaaggattaaaccacgcgtgaaattccaaatttcgtttatgggtttcttcaatcataaatgcaagaggatcatagccggggtccttcccttggacaccggttaagtattccgaccaaggcccgtaagctgacggataaaaggcatcagccgtcggtttaatctgaacgataacggcattcattcccattttttgcacatcgtccagcagtttgatatactcctgtttttgctctttcacagataacccttttttggacggccaatcaatatttaatacggaagcaatccatacggctctcagctctctgtcagactgcgcattggccataaacggaacggaaatgacaaacgttccgatgatcaagctgacaaggaaacggataatcgacttttggcaaaccttcattctgtttcttctcccccattacatcactttcactcgctattacggtattcccgggctataaaagggtgattaacagaatgtctatctcactaaataaacgaaaaaagtcctaaagcatgttgtgggccgcttttaggactttttatcattcatcatggtttgcaaactttttaacacgtcaataagttttacgccgacaccgacagccgtttcaaggatcgcttgtgctccggcaatggctaaaataaagatcagcggtattgcaatacgaggcaaaaaaagatagccaagtccgatcaagatggcacaccaaacaccggcacaccagtagcaattgagcatgtatccaaagttagaagccggcacacttttttcatctacatgcccgttttgatcaacaatccttttctttttcataaaaggtttccggataaattctgtgattttgtcgaatacaatcaaatgtgtcagcctgtaactggctagaatcagcatgataaacgtaagaaaagatagatgatccatgacaagcctccaagaaaaaggatgatgttatcattccctagtgtcatcgatccattctttgatacaaaaagaagcggacagagaatgcctctgtccgcgaatccgctctattgtttgtgcgggattgctttatttgaagtgatcttttctaaaatgtcgaggatgatgtcagcattcttttcagcatatgttccttccagcatgtctttatgagcgccaaaacccgtgtactcactatagtttccacaggcgccttcccatttcgttaagcctgtattctcgctggtttctgggtggattccagcttcgatgaaatgaatacttgctttgatgtgcccttcattcagcaattgtgcccaatattcctgatagtttctttttttcttcatcaccttttctctgactgcttcaggcagatatgctgcagattcgtcattaccggtatcgataggcaaaggctgttcttttagataagcgtccacgataatgaagtcgctgacttctaatcctttgcgctccatagcctgtgccacttcaaaagccaggtttccgcctgcagagtagcctaataaaacgtatgggcccttaggctgtatgtccgtcatgcaattaacatattgttcaatgcgggtgtcttgttcaataaagtgaaacccgtatacggctgccttctcattcagcaataaagcaaggtctttaaaataaatgccaaatcccgatatcggcgggaagcagaaaagattttgcgcgccgtgctggttcagtttgatcacatgctgttcatttgctgctgtcagctgtttagaataaagtttttcggcaagctgagcgattgtcggatgttcgaacaagaaatcaatcggtatgtcaatgttctgctgatgttttagtgtatgtatgacttgcagtgcttttagtgaatgtccgccaatagcaaagaagtcatcatcaatactgattgtgttaacaccgaggacttgcttccaaatgttcgccaattcttcttcaaccaagtttcttggcaatatgatgttctgtcgtttggcaggcttattttctggaataggcagcgcgctgcggtctatttttccgtttccggtaagcggcatccgctccacacgcacccagtgctgcgggatcatatagtctggaagcacacgcgccaaatcggcgcgaaaatccgtatctgtttttttgtgatcaccgacgtaatgagtgtacagctgcgcctctccatctttttctctcaatgtcactgctgcttcttgaacgccttccatttctaacaggcgcgcttctatttcggcaggctcaattcgttttccgcggattttcatttgcctgtcaattctgctgatgtattctaagtttccatcaggcagccagcgcgccaaatcaccggtacggtatattctttctccaggcaagaaaggatgaggagaaaacacagcatttgtcaggtcatctttgttcaaatagcctttagcgaccccatcaccgccaacacaaagctcgccgggaacgcctattggcaaaagacgtccttttgtatctaagatgtaagcggtgctattgctgattggttttccaatcggaatcggccccgcatagtctctctttatttcaaaaaaggttgaaaaagtcgtgttttccgtaggcccgtaaatattatgaagcgcgagatctggacaggcgtgtctgacagcattcatcagagcaggagagagtgcttctcctccgacatataacgtatggaggccgcgaaacatgtcagctcgtacctgtgccagctgattaaaaagagctgtcgttaaaaatagcactgtgatgtcattttcaagcaaatacgctccaaaccgatcaggtgtcagcattgtcgatttatcaatgatatgaaggcttgcgccatttaaaagtgccccgaacatttcaaaggtgacggcgtcaaagctgatagatccagtcagaataaaccggtcatcaccggacgcagacgtgtaattgctgtttctgacaagggacacgacattgcgattcgtgatcatgacccctttcggccggcctgttgatcctgaggtatacatgatatatgcaagatcgtctggactggagatggtgttgataggaaaatggttctctcccatcaatgcctgcgcatctgcaatcatacatgttcctgagaacgcagcattttgctccagccccttttgaacaatcagcatttttgcttgcgtttcctcaagcataaagctgactcgttcaggcggaagctcctcatcaagcgggaggtatgctccccctgcttttaatacggcaagcacactgatcatgaattcgggagaatgtgcagccaatattccggctgtctcgtttttccgaaatcccttttgaattaactctctggcgagcgcattagagcgtttatcaagctctttatacgaaatagacatattgccatacacaagtgcggtatggtctggcgtcttttctgcttgttcgcgaaataaatcgataattgtatgtttctttggatactccgtttttgtattgttgaactgtgtgacaatctgctctttttctgttgcatcaagaaaagaaaaatcagcaattggcatatgagggtgctgtgcagctgtgctaagcgcttgcgtaaattgcctcttgatacaactgatccaggcagcatcgtaaacgaatgcattatagctgaacttgatgacaagctcttcgccgggagcaacgacaagattaaagttatatcctgattgctcggatacttgaacttgatcgatttgcagcggtgaatcggtctgatcagcggaatcggcgattttctgctgtaacggatagttttcaaagacgataatgtgatcaatcagttcctgttttaatgcggtgtttgcctgaatatcaaataaaggctggcaggtaaacggctcagcttccagcatttctttctggcatcgtatgaacagttcttgaaacgtttcgtcttgatgtgttttaattcgaatcggtatggtattgataaacaaccctatcatttgctccacgcccgggatttctgacggtcttcctgatacaactgcgccaaacacaacgtcgtctgtgcggttatattgctgcagcatcacaccccagacagcctgaataagggtagcgagcgtgacgccgtgttgtttggcagtctctttcagcttgtctgtcagtggtttatttaatgaaaatatcaaatcttcacggtgataaccttcttttgtttctttatcagacacacgaggcagaggtgatggagtgctgtagttttttaaataggtatcccagtaggccgctgctttttctttgtctcggtttgtcagccaggaaatataggtgctgtacggccggacagggtctaatgaaagcggttttcctgcatgaatcgattgataaatttgcataaattcctgcataacaatacctaggcaccatccgtccattaaaatgtgatggtgactccaaagacagacatgctcatcttcagctgttttgaacagagaaatccgcatcagcatgtctttttgcagatcaaagcctttttgcttgtccttctctttaaagcgttcaatatactcattctggtcgtttgttggcagatgggaaatgtcttcgctgtacaaatggaattcacgttctgtcatcacgacttgccgaggtcccgacaaatgcgggacgtgcggcaaaaacacggttctgaaaatatcatggcggtcgataatggcttgaatgctgcgctgaaaccatttatagctgaggcttcctttaatggtgaagagcgactgctcgacatacgccccctcctctttacggaggaaggaatgaaagagcattccctcctgcatgtgactcagaggataaatgttcttgattttttttatgttatccatagtgtctgcacctttcttcacggtttcattagtgaaaactgagcatatcagcaatctcttgcagggcatcctcggtcagttcttgatcatcataatcgctgatcgttttttctgtttcgcttttgttctggcagtgttcgatcagctgtaataaaaattgacggcatgtttcgctaagctgttcgatggttttgcgctgaaaacgggtagtgtcataagtcatattgacagtcattttcccttctgcagcgattgcactgatatccagcgactgttcacggttccatgttgtgctgatatcacccccggcacccagcggagagaatgagaaggcgtcctcctcaggtacttcagctgtgcggccgctttcaaattgaccaagataattaaagctgatttctggtgcacctgtgaaattgatgtcttttttgccaggcggagtcaaatatttgatgacaccgtagccgaatcctttgtcaggtacacgtctcagtgtatcttttgttgtttttagcacatgaaccatgtattcttccgaatctggcaagtctgcgttcaatttaaccaataacggataaatggcggtaaaccatccaaccgtccggctcacatctattccttctaatacatcctctcgcccgtggccctctaatgatagtttgaaggcggattgattggtccaatggcgcagcgcaagaatgacagaagcgagcagcatgtcctgcgtatcagtgttatatgcgctgttggcgtcttttaagagtgctgctgtctctttctcgtttaaggtaaacgaaatcgtggaccgttgtccctcgtgtgctctagttccatcaatgtgatcaaaaggcaatgcctctgtttgatactcttcggcttcgcgccaatacttgagctgtttcatgagctgctggctttcagcgtagtcagagagctttttcgtatacgctttaaatgagcttgttttaggcggcagtttgataaccttcccgtctgcagcttggcgataccctaaagccaaatcttcaagcagaacccgccatgaaatgccgtcaacgacgaggtgatgagcagataaaaataagaaatcaccgtcaattgtgtggaaaagaccggcttgcagcagcggaccattcttcaaatccattttctgctgaatatcaagtacatgacgtttgataataggctcatacgctctatttccatcagtgcataaatcaatcatctcaaggccgtacaacgcgtcgtccgaatgactgagcggccgattatattgatcccactttccttgttcattctgtgtaaacaccattcgcagcgcatcatgatgacacgttattgcttttaacgttttgcgcagtgcgtcttcttgtacaaaggtacttcgatgcagcattacggactgattaaaatggtgtttttcttttatatcttgagaaagaaaccatttttgaacaggcgaccattgtacgtctccctcaaccgcagcttggctggaacttgtatctgaatcacggatataagctgccaattcttgaatggtcggatggctaaacaaatctttcactgccatttgcttgcctatccggtgaagccgcgcagatacctgtaacgctttgattgaatctccgccaagttcaaagaacgaatcagctgttccgatcttttctgcccccagtacttcttgccatatatctgccagtatttgttccattttgctggctggcgggaggaatggacgttcaccttcgtggttatatacaggttttggaagtgctccgcgatccagcttgccgtttggtgacaatggaagtgagtccagtttttcaataaacgcagggtgcataaacaccggcagcttgttttgtaattctgagcgtacagcatttgtgctcaactctggttttgtcaccacataagcacttaattcggtttgtcctgacgctgtttcatgagcaactactgcggcgtcttttacaccatttatacaccggatgaccgattcaatttctttcgtttctacacggtatcctctgattttgacttgatcatcgattcttccgagatattcgagtgttccgtcggccatccatctggcggcgtctcctgttcggtacattcgtgtttcgggtttaaatggattctgcgtgaatgctctctctgtcagttctggaagattaacgtaccctcttgcaagccctgttcctgctatacaaagctctcccgcaacaccgattggctgaagctgatgattgctatttaaaatcagcacttgagtcccgtcaatcggctggccgatgcttacgtatgcctgcttttccatatgtctcatgacggtagtcgccacgctgttttctgtcggtccatattcgttggcgagttcggtatgcggacatatagctaagctgcggtcgatcaattcgcggtcagccgcttctcccgccagtgtgacgactctaagtgtctttacatcttccggctgcactatgtccaaaagcgctcgatataaaacaggcacaataatcatatgtgtaatccgttgacgagacagctgatgcttaatgaccagaatatccttcgcttcctcttcatgaagcaaaacggcttttgcacctgacaaaagcggtgtaaacatactcgttataaagccgtcaaatgagaaagaaaagagctgcagaatggtatctgtctcgttgaatgcataagcgtttcgccgccactgaagagtgttggcaatacctttatgctcgaccattaccccttttggacggcccgtcgttccagaggtataaatgatataagccaaatgatgagcagacgatacttgcggcagcggtgatttgtcgtatgcctctacactttctatcgctaagaactctccttcaaagtcagcaagtgcttcccgatccgcttcatttattgtcatcagcagtttcgttccgctgtcgctaaggatatagcgtttccgttctgtcgggtattcaggatcgatgggaacgtaacagcctccggctttccacacaccaagtatggatgctatcatactgaacgaacgatgcatcatgatgcctactggtgtgtccggcttaacacctcggctgcgcaatgcacgtgcgattccattggaccactcgtcaagctcctgataagtgagtgttttgtctccgctgacaagtgcagaagcttttggtgttcgtgcagcttgctgctcaaacaattgactgattgtttgaactccgtattgattcgcttgcccggtgttaaactcattaagcagctggtgccgctcttcttgggtcaggatgtcgatatggttgagtgtcacctccgggtttttgccgatgatgctaagtacatttgttaaatgcgatacccagcgttcaatggtggttttctcgaacaatgcggttgaatattcaaaaaggaaatgaatgtttccgtcgccctcagatgcctgtagtgtcaaatcgaatttagaaacgagatgagaaacttgtgccggcttcattttcaaatcatgaagatacaatggctcgtaatcattattttgaacaactaacatcgcatcaaacactgggttccggctcatatctcgtgtcaatccaagcttatcgacaagctcttcgaacgggtaatcttggtgctcaaaggcttccaatgctgtctcacgcacttcctgcaaatactgtacgaatggcttcccgccctccgggcgtgtccgaagcgccagcgtgttcacaaacatgccgagtatcggctcaagatccttgtgcggccggccggcgattggcgagccgacgatgatatcctcctgtccgcttaagcgtgacaagaacgcggtgtaagccgcaaggagcaccatgtacagtgtgcttccgttttctcgtgccagcttgtgaaggcctgatgcaacctcttgatccagcgtaaatgagaccttgtcaccagcgaagcttcgcaccggcgggcgggcatgatcagcggggagatccagcacaggcagctcgccctcgagctgcttcagccagtacgcctcttgcgttttgtacgcgtctcctgttttgaatccttcttgccatacggcataatctttatattgaatgcgcagcgccggaagcttccgattattgtacagctcgccgaattcttgaatcagaatgttgacggaaacaccgtctgaaatgatgtgatgcatatcaaccagcaacaggtgccgctcatctgatacctttacgatttgggcacggaacagcggcgcttggctgagatcaaacggtttgataaatgcggctgcggcctcctgttcggttcgttcgccgagaactgtagtctgtaacgtaaacggcacctcgtcatggatgcgctgcaccggatcgcctccttcgtcctgttcgaaggcggttcgaagcgactcgtggcgcttgatcagctcttggaaagctctgtccatcctttcagggttgagcttcccttcgagctctaacacagccggcatattgtagcctgtccctccgtcttccagctgctgaaggacataaatccgcttttgggcagaggaaaccggataggtttcctgtttttcagcgggcttaatcgcttcatatggactgtccgttccttcacggataacggtagccagtccttctaccgtcggatgggcaaacacatcttttagcggcacctgtacatcgaattctttggtgatccgtgagacaagcgccgttgcttttaaggaatgtcccccgcggtcaaaaaagttgtcgtgaatcccgacagggccatttttcagcacgtcctcccacagctgagaaagcttcatctcagtcacgtttctcggcgctgtgtaggtctccgcatctgccgctccgccaggagctggcagggcgtttcggtcgagctttccgcttggcgtaaccggccactgtttcatttctatcatataggctgggaccatgtagcccggcaacagtctctcaagctgtgcacgcacttcgtttctttggagcccttctatataagcgcataattccggctccccgctgtctgtccgtacggtaacagccgcctctcttacaccttctatatttcttagtgccgcttcaatttctcccggctcaatccggtagccgcggatttttacctgatcatccgtgcgcccgaggaattcaacattcccgtcagggagccagcgcgccacatccccggttttgtacatgcgttcccccgggtaaaacgggtcttcaagaaaacgctcctccgttaatgccggccgattcaaataacctctggcaacacccgctccggcaatgtatagttcaccgatacatccaacaggcagcatccgctgattctgattcaggatatacaatctgacatgatgaacaggttttccaattggaatccgttcaagtttttcttgcggcggacaatcaaagaatgcagcttctacggttgcttccgttggcccataggaattggttattgaaacatttggaagcaacacgtgaaatcgggagacaagatgggtctccagctgttctcccccagaaaacactcgcttgagtctgtttgtcttaatcggtacagagcgatattttatatgttctaaaaatgcatggagcattgaaggcacaaaatgcatagctgtgatcttttgttcttctatggccttcgcgatcacttcaggttctttttcgcctccctgaggaagcagataaacagaagctccggcataaggccagcaaaacagctcccatattgaagcatcgaatgaatatgatgttttgtgcataatcatatctgaatgctttagctgatagcgggactgtagggaattcaaaaaattcaccgctgatcgatgttcaatttcaacacccttaggcatcccggtagaaccggatgtatagatgacataggctaaagattgcgggagaacatccacattcggattggacaaacgatgtgccagtccgctatttgtctgattgagatagacaatctctcctgcaaatgccggaacatgaagaccggaagactgaagcaggagaatgtttgtaccgctgtccttcagcagaaagctgattcgttcttccggataatccgggtcaatgggcagataagcgccgccagctttaagaatgccataaatgccgatcagcatttcaggcgaacgccggcctataatggcaacagtcgtttcagattttactcctcgtccgatcagctcccaggcgatacggttagcctgttcgttcaattctttataggtcatcactccatcttcgaagataacggccgcctgatcaggcgtttttgctgcctgctgttcgagtgcatagtgtagcgtttgattcattgaatagcccgtctcctcaaacagatggcatgattcaatgaaatctctctcttcttcttttgttaagattggaatatcgtccaattctgtttcaggactggcagctgtatgttccacaagcgtggtgaaaaggctggcccacctttggatggtttctttctcaaacaaagctgtactgtattcaaactgacagaaaagctcggaatcatgctctgtaacgtatagggaaatatcaaattttgatattgggtgctccaagtcgttccactgaagctgtatatcattcatttttagcttttgctgttccatattctgaaggactagcgttgtgtcaaacaaaggattccggctcatttcccgctgcacaccgagtttgtccacaagctcttcaaacgggtaatcctgatgctcatacgcttctaatgccgtctgtctgacttctttcagaaattcctcaaatgtcttattacccgctgggcgtgtgcggagagccagtgtattgacgaacatcccaagaacagcttcaaggtcggcatggggccgtccggcgattggtgaaccaatcacgatatcatcctgaccgcttaaccgagacaaaaaggctgaatacaaagcgagaagcgtcatataaagcgtgcttctgtttttatgggcgagccgctttatgcgggccgtgatctctttgtccaattgaaaggttacttttccgcctatgaattgccgttctgccggacgtcgtttatctgttggaagctccagtataggaagatctccgctaaactgctgctgccagtaagtctcctgcttttggtacgagtctccctttttaaatttctgctgccatacggcgtaatctttatattggatccgcaatggcttaagctgccggtttgcataaagatcggtaaattctcggattaggagctgaacggatacgccatctgaaatgatatggtgcatatccaccagcaatacatgcttctcgtttgacacttctataaggcctgctctaaataatggcgcctggctgagatcaaagggacggacaaatccctcgatagtggtctctttacttaacgtaaacggcacttcggtgtggatacgctgaaccggctcgtcatcagctccaggtacaaaggaagttcgaagcggctcatgccgactgatcagttctttacatacagcagacagtttggcgacatccagtgcaccttccagttctaagaccgcaggcatgttataggcgacaccctcatcaagctgttgaagcacatagattcgtttttgggccgaagatacaggatatgtatcccttttttctgctggttcaattgctgcatacagattttgttctgcctctcgaataattaaagctaatccttcaacagtcggatgagcaaagatgtccttaagtgaaacttgcacatggaattcctttgcgatccgtgacataagcactgttgcttttaacgagtgaccgccattgtcaaaaaagttgtcttggatgcctatatgcccattctttagcacatcttcaaatagttgcgaaagctttgcctctaacagatttcgaggggcagtatatgggtttccgctgattgaagcatctggctccggaagtgctgcgcgatctacttttccgtttggggtaagaggtatgctgtcaacccatatccatttcgccggaatcatgtattctgggagctcactagccatataactgcgtaaatctattgcattcagcttttgtacactgcaatagtaagcgcataattcatgttcaccgttttgatcttgccagatgagaatggcagcctcactaatgtccggatgattcattagcgtgacttcgatttcttgcggctcaattcgataacctctgattttcacttgattgtctgcccgtccgatatattcgatgttgccgtcttcaagccgtctggccaaatcacctgtccggtacatgatcacatcaggcttgaatggatcggatgaaaatttgtcgcttgtcagtttatcgtgattgacatatcctctggcaacacttgcgccggaaatatagagttcgcctggtacgccgcatggctgaagctgtttttgatgattcaaaatatatagatcagtacagcctatcggtttaccgattggcggaagctcaggaatagggtctccaggatgaatggtatacgtagataccacatgagtttctgaaggtccgtaatgattgtgcaggtgtatgccgcgttcacacaacacatcttggaaaaggtctgaaatcattaattgttccccggctgcgatcaggtgtttgacgccatcaggaaacgagttcgcaagttctcgctcgctgaaaatcattttgataaaagcagttgggagaaacacaatattcgtctgatgcttgtttataaatgcaaacagctgaggcacatctctttttatggcttctggcacgatgtggagtgtgccgcctttcagaagcgcagaaaatatttcttgatagcagacgtcgaaggaaggtgtcgcaaattgcagaacatctgcttcaaagtcaatgccggagtgagtatattcgaacttcagcaagttagccatgtttcgatgctcaaattgaacaccctttggtttacctgttgtgcctgatgtataaatcatatacagcagatcgtcagcattgttgactgactttatgttactgccgtctactttgctttcgatatcttctggatgagtgataatgtaattgtcttctaacgatgaggaaagatgcgcttgtgaaacaacatgcgaacagccgcaatcatgcagaatataacggattctgtcagccgggtaatgcggatcaaccggaacaatggcgccgcctgctttcaagataccaagaacacctgtgataaacgccgctgagcgttccatcataatcgcaacgggttcctgtctcacaacgcctttcattcgtaaatgccgtgccaatctgttagccgctttattcagttctctgtatgttaatgagcaggcttgatcaattacagcatgagcatctggtgtcttttccgcttgcttttcaaacatggcatggatggtttcgtaaactggtgttcgatctgtgatttctccaatcagctgccgcttttcagtatctgtcgtgatatcgatttcttcaggtggaagattcggattatttaagatttgtgatacagcattcagaagatgctctttgacagagagcacaaaagaccgatcgtgctgctccgcatcatagttcattttgatatgaatttcttcccctggcgccaccataagataaaagctgtagttggtttcatctgcgacagtgaaattatgaatctgaaaaagatcagaagcatgttcctgtttgttcagcatttgaatctcttgctgcaccggatagttttcaaatacgagaatatgatcaatcagcccttgtttaacagctgagcgggattgaatctcatataaagggtggtagctgtacgcttcagcggcaagacggtctttttgcatatcttttataagttgaagaaatggcgtttttgccccctgcacccgaaccggcatcgtattaatgaaaagacctaccatatgttcaatgccttcgatttctgcgggtcttcctgaaatgacagaaccgaatacggcgtcatcgttattattatatttttgtagcagaatgccccaaatggtatgaaaaatcgtactgagtgtcacttcttctcttgcagcaagctctgaaagtctgctgctttcttccttagagaatgaaaatgtaacgtgttcctgcctgctttttccctttgtttttttctgcttcgggagcacggtttgctgttcgtggccggaaagataatggtcccaataagaaaccgcctgctctttgtcttgctccatcagccatttgatatactttccgtatggctggaccggctccaatgttataggggatgcatttacataagatgcgtaaatatgcagaaactcctttagcacaatgctgaggcaccaaccgtccatcatgatatgatgaaaggtccaaatgcaagagtactggctctctcctgtttgaataagagcgatgcgcatgagcacatccttttgcaaatgaaacccccggtcccggtccttttctttccattgctcgataaactgtgattgctccgcctcgtttaaatgagtaatgtcttcttccagcacgatgacatttcgttctctcagaacaacctgctggggggaggaaacattttggctgataaaaatcgttctgaaaatatcatgtctttctacaagagcgttgatgctgttttgaaaaaactgcgggttgacttttccttctattgtaaaagaagcttgctcaacatacgcctgtgaatctttttgcaggagggaatggaaaagcatcccttcctgcatgtaagacagcggataaatatcctgaattgaattcgcttttgtcatgttcatgtctccctgtcacgattttctacaattcttccaccaagctggatatgctgtccaagtcctctgccgttaatgattgactgctgaaatcgctcagtgtcttttctgctttctgttgaccggcgcagtgtttcataatgtccagcaaaaagtgttcaatcctgttaataagctgctccattgtgtttctgtgaaagcgggctggcggataactaagattgaaatggagctttttgtctgctgccattgcactcatctcgatgatttgctcacgcttccatgtatgagtgatatcctttccgctaccaaggcttgatgggcggaaggtgtcctgtctttcgatgtcgttgaactggcccaaatagttaaagctgatttcaggtgtttttgaaaacgtaatgcttttattttcagggtgtgtaaggtatttcagcataccgtaacctacccctttgtttggtatccggcccagtgtatctttaacggtttttactgaggttccgagctcatccctatgattttcaaagcttatgagggccgggtacatggatgtaaaccagcctaccgtcctgctgatatctaactctggcagaatgtgttctctcccgtgtccttccatagcgatacggagcttgcttcctcctgtccattcacaaatcgccaaggatgctgcggttaacagaatatcttgtgtatctgtgccataggcgtgattgacgttttgcagcaagacggcggtgtctgcttcagtcagtgaaaagcttaatgagtcccttttgctggtgtccatgttcagatgctgcggtatttcgtatggcagttctgcggcttgctgttcttctatacttcgccaatacgcctcttcgcgaatcagcttactgctttgggcatattcctgtatgcgtcttgcgtattcctggtaggaatccgttttaggcggaagctggatcgtctggcctgcagcagcttgttgatatccggctgacaaatcctcaagcaaaatccgccatgagacaccatcaacgacaaggtgatggatcgcaaggaacaagtaatctccgatcagtgttttaaacaaagcggcgtgcaacaatggtccttcctgcaaattgatgctttgctgaagatctgcaacttcttgtttgatttgcgtctcccagccgctttctgactgtgaaagatcagaggttcttaagctgtatagctgtgactcatgaatgccttggttgatttgaatccatcgcctatcatcgttgcgataaaccatccgaagcgcatcatgatgctccgccagttttttcaaggctggtctaagggcgttttcagacaaacgtccagaatggaatagcatgacagactgattgaaatggtgtctttcttcaatatcttgtgaaaaaaaccattgctgaacaggcgtccaaggaacgtctccctgaatgggtccttgctctatgattctctctgacttacggataaatggtgataagtcctttatctttggatgacggaataaatcacttacctgcaagcttagcccatagcgcccaaggcgtgcagaaacttgaagcgctttgattgaatctccgcccaattcaaaaaacgaatcctctattccgatcctctggatgccgagaacctcctgccagatcaacacaagttggtcttcaaggtcatttcgaggcggagcgtacgtttgtttagatgtgaaatttggttcaggaagtgcttttcggttcaatttgccgtttgatgtgagcggaagagtctccatttcaataatgtacgccgggatcatatagtttggcagcgaacgcgcgagaagtgaacgcacttgttcagcattcgtgcctgcttttacgctgatatagccaaacagctctttgctcccggtctgggctgtacgtgctaacactgcggcttctttgaccccgtctatttgacgaagtgctgattcgatctcacccagctccacacgatagcctctgacttttacttgatcatcaatacggccaacgtactcaattgtgccgtcaggaagccagcgcgccagatcacctgtgcgatacagtcgatcgccaggtgcaaatggatgtgggacaaatttctctttcgttaaatcaggacggcccaaatatcctctggcgacgccatctccgccgacacaaagttcaccgacagctccgaccggctgcagcactccccattgatttaagatataagcggtggaattaccaaccggccgcccgatcggaatggaaagttcatatgttttttgaatgtgaaggcatgtcgaaaaagttgtattttcggtagggccatatccattccatatagatacttcagggcagacatttctgattcgattgacgtggctcggcgacaaagcttctccgccaataatcaaatgtttcagctgtgaaaatgtttgttcattttgttctgtcaaatgattgaatagagaagatgtcagccaaatcgttgtgattccttgatgttctatgtacctcttaagctgatgggaatcgagaaatgtttgttgatcggacagatgcaaagcggcaccatttagcagcggtccgaaaatttcaaatgacccaacgtcgaaacctattgatgatgtcatcagaaggcggtcttcaggtgtaaatgtaatataattgctgtttttaacaagacgaattacacttcgctgctcaatcatgacaccctttggtttaccggttgatccagaggtataaatgatatatgcgagtgaatgtggccctgctgaagaatcaacgttcttcgtttttccttgcttttgaatatcttcgattatgatttgttcacattcaatgtctaatagctgtttttctgttttttcagattgaaggagtaatgccgccccgctgtctgacagcatataagctattcgttcaacaggcagatcagaagcaataggcagataggctcccccggctttcagaatgcctagcattcctgcaatgagttctggtgttctgcctgtcaacaaggctacaacactatcaggccctacgcccttaatctgtagaactgaggcaatttgatttgcccagctgttcaggtcctcgtaagtaaatacttgggtgtcgctgacaattgctacagcattaggcgtttgttcagcctgcatttcaaagagtctgctgatggtttcatttcttggataatctatttttgtgcgattgagctcgtggataaggtaatgggtctcatcctcattcaggatatttattgttccgagagcggctttgttgtctttgaagatggagagtaacatattgatgaagtattgaagccacttttctatcgtttttttcttatataagtcagtactaaactccatttggaacgtcagcaaaccgtggggctgttcctgggcatatagggttaaatcaaatttggacgtttgatgcccattgtttgctgcaggtttgagacaaagttcatccagctccaacgattcctgatccatgttttgaagaacaaacattacgtcaaacagcggatttctgctcatatcccgtgtcaattcaagcttatcaacaagctcttcgaacgggtaatcttggtgctcaaaggcttccaatgctgtctcacgcacttcctgcaaatactgtacgaatggcttcccgccctccgggcgtgtccgaagcgccagcgtgttcacaaacattccgagtatcggctcaagatccttgtgcggccggccggcaattggcgagccgacgatgatatcttcctgtccgcttaagcgtgacaagaacgcggtgtaagccgcaaggagcaccatgtacagtgtgcttccgttttctcgtgccagcttgtgaaggcctgatgcaacctcttgatccagcgtaaatgagaccttgtcacccgcgaagcttcgcaccggcgggcgggcatgatcagccggaagatccagcacaggcagctcgccctcgagctgcttcagccagtacgcctcttgcgttttgtacgcgtctcctgttttgaatccttcttgccatacggcataatctttatattgaatgcgcagtgccggaagattccgattattgtacagctcgccgaattcccgaatcagaatgttgacggaaacaccgtctgaaatgatgtgatgcatatcaaccagcaacaggtgccgctcatctgatatctttacgatttgggcacggaacagcggcgcttggctgagatcaaacggtttgataaatgcggctgcggcctcctgttcggttcgttcgccgagaactgtagtctgtaacgtaaacggcacctcgtcatggatgcgctgcaccggatcgcctcctgcgtcctgttcgaaggaggtacgaagcgactcgtggcgcttgatcagctctttgaaagctctgtccatcctttcaggggtgagcttcccttcgagctctaacacagccggcatattgtagcctgtccctctgtcctccagctgctgaaggacataaatccgcttttgggcagaggaaaccggataggtttcctgtttttcagcgggcttaatcgcttcatatggactgtccgttccttcacggataacggtagccagtccttctactgtcggatgggcaaacacatcttttagcggcacctgtacatcgaattctttggcgatccgtgagacaagcgccgttgcttttaaggaatggcccccgcggtcaaaaaagttgtcgtgaatcccgacagggccatttttcagcacgtcctcccacagctgagaaagcttcatctcagtcacgtttctcggcgctgtgtaggtctccgcatctgccgctccgtcaggagctggcagggcgtttcggtcgagctttccgcttggcgtaacaggccactgttccatttctatcatataggctgggaccatgtagcccggcaacaggctctcaagctgcgctcggacttcgtttctttggagcccttctacataagcgcataattccggctcgccgctgtctgtccgtacggtaacggccgcctcccttacgccttctatgcttcttagtgccgcttcaatctctcccggctcaatccggtagccgcggattttcacctgatcatccgtgcgcccgaggaattcaacattcccgtcagggagccagcgcgccacgtctcctgttttgtacatgcgttcccccgggtaaaacgggtcctcaagaaaacgctcctccgttaatgccggccgattcaaataacctctggcaacacccgctccggcaatgtatagttcgccggcgacaccggaaggctgtacggctaaatgcggatctaaaacatacaaacgcgcaccaggtacgggcttcccaatcggaatccgcaaacggtctctgtcccgttctggatccaatacgtaaaatgccgcgtctaccgttgcttctgtcggcccgtagccatggattaatgatacctgcggcaatacagaagcaaaacgggctgccgtacgcggcgcaagcggttcacctccggcgaatacacgctttaggtttgtcccgtcaccaagcgctaacatttctgcttgatccagaaagctattcagcatagccggaataaaatgagccgttgtcactttttcctgatgaatggcttttacgatcaatgcggagtctttttcccagccgggcggaagcagatacgccgaagcaccggaaagagcccaccaaaacagctgccacacagacgcatcaaaggaaaaagaggttttcaccatgacaatgtcatcttctgaaagcggaaactggtgctgcatgccggtcagaaaggaaacagcctggcggtgctcaacggccactcctttcggctgcccggtagaccccgatgtatagatgacataggcgagagaaccgccgtcagcaggagtaaacagatggttttctgctttttcgctcgcaagagatgtcatatccacttcaagcgtttcgccagaaaagttcggtgcggagcatcccggctgtgtcagcaagagcgatgccccgctgtctttcagcatgtagctcagccgctcctccggatacgcaggatcaagcggcaaatacgccccgccggccttcagtacagcaaggacagcgatcagcatgtcaggtgagcgttcagacaggatcccgacgatactttcgtttgtgacgccgcgtgccgcaaggtgagcagccagccggctggcgtacatatcaagctcagcgtatgtcagcgaaccgcctgaaaagcgaatcgctggccgctccggtgtgactgccgcctgtcgttcaaacagcccatgcaaggttggggcttcaggtgaaacagatactgtcctgttattttgagaaacgattttccgtgttttgtcctcatctagcaatgtcatctttgacacaggaagagatggatcagagatgacgtcagagatcatgtgctgtaaataatcttttatttcggacatcatatttggttgataagtgcctgtatgaaaatgaatccgaacgtacaaagtacgccctgggatcactttgacactgcatctataattagttacctcttccatctcaaaatctttcacggagaaatcaaatgatccagcttgattcagctcttcaatctcttgttgagtaggtgtattttcaaagacgataatatgatcaatcagctcttgtttaagagcgctctgcgcctgaatgtcatataaagggaagtaactatacgcttctgcttcagtcatgtccttttgcattccgctgactaggtcagaaaaagacagaaaatcactttggactcgaataggaatggtattgataaaaagtccgaccatgttttccacatcttttagctcagaaggtctgcctgatataactgatccgaatacagcatcgtcgcgacgattgaacttttggagcatgattccccataaagcttggaaaacagtgttaagtgtcgcaccacatgctgcagcgattttctgtaattcggaggtttctttttcaggaatggtaaacgtgatctgctgtaatgtcccatccgacatttgatctgttcttttaggcagaggtgaagctttttcgaaatgctgaagcctctttttccaatactcagctgcttcttcccggtcttgctgcatcagccatttaatatacgtcccgtacggctgtacgggaggcaaatcaggaaactgcccttttccaagcgcttgataaatatggagaaagtctttaatgacgatgcctaaacaccagccatccattaaaatatgatggtggctccagatacagacataatgatcaggcgcccattttaaaatagatattctcatcagtacatccgtttggagatcaaagccttttgatttatcctgttctttgaatgcctctgtacaatgttctttatctttttcattgagatgagaaatatcttcaacatgaatatggcaatgacgttgcttgagcacgacttgacgaggtttggctacatttttatagatgaatgctgttcgaaagatatcgtacctgtcaaaaacagcatccatacttttctggaaacgctccaagtcgagctgtccattgatcgtaaaagaagcctgttcaaaataagctctcgactgttcatcatacaatgagtgaaaaagcatcccttcctgcataaatgacaaagggtatatatcctgtatttcaggttgctgcggcatcagtgaatctcctctcctatagtttgttgacggctcccatgatctcactcaattcatcaagcgttaagtcttcatcagtgaaatcagatgcgctccactctcggttttctttgccggtacaatgctcaatgatgttttccagagtctgtttaaaatgcctggaaaatgtttggattgttttttcctcaaattgaaccctgttatagatgatgtgcatgttcaggcaccccgaagaaacggcgccgctgatatccagtgcataaggacgctcccagttcgggctgatctcatttcctggcttgatgtcagacacctcaaaggcatttgattgaatatcctgatcaaactggcctaaataattaaagctgatttctgggctgtttttctgagagccccatcttttgctgatatatttcagcacgccgtagcccgcgcctttatgcggtatacggtgcagcatatcttttgtctgtttaataaggtggcccagccgctcttctttgtccttatgatcggaatctctcatatcaagccacacaggataaatggaggtgaaccagccaacagttctgctaatatcgatgtcctcaagatatgattcccttccatggccctccatgctgattttaaattggttatttcccgtccatttctgcaaagcaaaacctaaagctgtcagaaggatatcattcatctccgtgctgtaagctttatgtgcagccgttaatagtaattctgtgtgatggcgagatagctcaaaatcaatcacttctgtatctatgaatgtgttagatgctgcgtcattgtcttttggaataggctggatgtgacggttctcgcactcatcccagtacgctgcttctcgctgcacctggcggcttttagagtagtcagctattctttgtgaatacgttaaatatgaatctgtttttttcggcaatttaatagattctcctgagactgcctgtttgtaagcagctgaaaaatcctcgaacaaaatgcgccaggaaaccgcatcaacaactaagtgatgaatcgtcagaaataaatggtcaccattctcggttctaaacaatccagcatgaagcaaggggccggtttccaaacgaatatgttcttgcatccggctggctgcttcctcaatcgtgtaccgtgcttctgttaggctatcctttacatcaaacagttcaagtgcatatagctcctcatctgaaagatctatccctctgtttatctgcacctgcctgccatcttcatgccggcatacgattctcagtgcatcatgatgagtcacaaggctttttagtacttttctaagcgcagcctcatcaaatcgttcagcccggtagatcataacggactggttaaaatgatggctttccagagattgcgagaaaaaccactgctggataggtgtccaagtaatctcgccttcgaccgggccttggtcaatggcgcgtacgtcttttcgaacccgggcggacagttcaccaagagtctgatgttcaaacatctcacgtactgtcgtttcaaatccgcgctgcttcagtctggcacaaacctgcagcgctttaatagagtctccgccaagctcaaagaaattggcgcttacacccagctcatctacattaagaagctcctcccaaatttcagccatgaccgtttcaatctcatttctaggactgatatcatcagatgtataagcgtgtttttcaggctcaggcagggctttctgatcgagctttccattaacagtcaccgggatgctgtcaatttgtatcatacgggcaggcagcataaagtcaggcaaggcgttttttaggtaagcccggatgtctgatatattcgcagcctgttgatcttttatcaccatgtaagcatatatagctgtttgcccttgctcgtctgctctggtaatgacagccgcctctttaatcattggatactgaagaagtgccgcttggatttcgcctaactcaatacggtgccctctgactttcacctgctcatcaatgcggcctaagtattccagctcgccatttgacaggcgcttagcaagatctcctgttcggtataatctgtctcccggaagataaggattggatacaaaacggtcagcggtcagctcatctctgttgagatatccccgtgccacaccttcgccgcctatatacagctcccctggaactccgatcggctgaagattcatatgagcatccatcacataagcctgcagagttgaaagcggccgtccgatattgcttttattttttacaatgtctgctgcggacaattttttgaatgttacatggaccgttgtttctgtaataccgtacatattaatcaaatcagtatgaggatattttttattccagctttgaagcatgccgggctgtaaggcttcgccgccaaaaatcacgtagcggatgtttaaatgatctgtatgattttgatcttcaagcatcaagctgtaaaaagcagtcggggtctgattgagtacagtgacgcgctctttttttaacaataaacggaatgcatgggggtcacgggctgtttctttagagaccacgactaatgtacctccgttcaataacgcaccgaacatctcccatacagagaaatcaaagcaataagaatgaaataacgtccagatgtcttcatggttaaattcaaaaggcaggttttgatgcttcaagagactgatcacattgcggtgctcgacaatgactccctttggctggccagtcgttccagatgtgtatatcacgtatgcgggctgatctgttactatttcttgaatgtttgcatcagccggaattgagttgttttcacattcatcgatatacaaaatatgcccggtgtagtctgcaggtttgttttgaccgcgctctgtcagcagcagttttgctccgctgtcattaagcataaagctaatacgctccttgggatattcaggatcaatcggcaaataggccccgccagcttttaaaatcgataaaacgccaatgatcatatcaggtgaccgatcgagcatcagaccgacgatatcgccagttcttaccccttgtttgatcagcatagcagctgcccgctcggctttttcattcaggtctcgatacgtaagctgagaatggccgcacaccactgcgatatgctccggatatttagcggcttgcttttcaaataagcttactatgttttcatttctcggataagccgcatactgtcccattttttcaaggagcaacctacgctctgcagcaggaagcaattgcatgtccgaaattctcatctcggtatccgccgttacccctttcaccaattcaataaaataggatgcccactgcgtaatggtttcttcttcaaaaagagcagtgctgtattcaaaacggcagcgtatcccactaggatgctcctcagcgtgtaatgttaaatcgaatttagatatatcatgtttaggagtgacagacgaaatcgacagaccaggcacttcgaaccggaaatcttcactgctttgaagcacaagcatcgcatcgaacagcgggttgcgatttacctctcgatttgtatcgagcttatctgccagctcctcaaaaggataatcctgatgctcgtaagcggtcagagccaggtggcgaatgtcctgcaaataggagctgaacgttttgtggccctcgggcttgctgcgcatcgccaatgtattgacgaacatcccaatgacgcgctccagatcagcgtgcggtcttccggcagcaggcgaaccgacaacaatatcctcttgtccgcttagcttagataacaaaatagaatagacagccagaagaatcatatataatgttgttcccgtttcagccattaaacggtgcagctcatcagccatgtctttatcaatgttgacttcaattgttccaccgctgaaatcagggagacgcggccttgttttatcaagcggtaattctagtgtaggaagactcccgccaagctgaccgagccagtaggcctcctgttttttgtatagctcttttgggtgcttctcttgctgccaaacagcaaaatccttataatgcaggtttaaagctggcaactcttttccgcgatataagtcagtaaattcttggacaagagtgctcatcgagacaccgtcggcaataatatggtgcatatcgagcagcaaaaagccgcggtgattgccgattgtaatgacacatgctctaaaaagcggaccggatgatagatcaaacggtttgataaaggtctcgattgcagactcaagcatttgttctgattccatttcaagctcttttagatcaaaagctatctctggataaatgatctgcacaggctcgtctctgtcaagcacaaaaacagtccgtaatgcttcatgccgattcacaagttctgtgagaacgcttctcaaccgctggcggttcagatttccgcgtaattcaagtacagctggcatgttataacctgtgctggcatctgccagctgatgaagagcatataatcgtttttgcgagaaagacagcggatagacatctctttgatccgcaggttcaatctgtgtaaaagcgtgttcttttaagctcatcaatttgaccgccatgctttcaaccgtcggatatgaaaacacctcactgagcggcagctcgacattaagctttttatgtattcttgataccagtgcggccgcttttaaggactgtccgcctaactgaaagaaatcatcacgaatgccgatgtgctgtttattcagcacatcttcccaaatatgtgcgagatcagcttcgattaaggttcggggcgccatatatgtgacactcgtattgttttctggttcaggaagcgcaaacctgtcaagcttgccgctggatgttaatggcatccggctgatgttgataatacttgctgggatcatataggacggcaatgtcccggcaagatgctgatacaaatctgggaggctgtttcccttttccggaacgatataagcaacgagctccttttcctcagcagaaacatcacgggccagtaccgctgcttcttttacccccggtgcttgtcgaagaactgtttcaatctctctcagttcaatacgataacccctaattttcacttgatcatcaaaacgtccaatatattcaatcgttccatcaggcaaaaagcggcctgcatcacctgttcggtataaacgctccccttcaaggaatggatgatcggagaatgctttctgtgtcagctcttgctgtttgtagtatcctctcgcaagacccgcgccggaaatacacagttcacccgccgcgccgatcggctgcatttgatttccgtgcaaaacaaatacttttgtgtttctgatcgggtgtccgattgtgatcctctctttttcattcagatgccgcaatattgttgttgccacactgttttctgtgggcccgtattcatttgccagttctgcagaaggacaaatcatttgactcaactcaagcagatcaggcgtgaccgcttcacccgcaaatgtcacaatacgaagactttttgcatcgtcagcagtcatcacttccaataacaccctgtacagggaaggaacaatgatcatgtggctgaccttataacgggctatttttcgcttaagggccagcacatccttcgcttcgtcatctgttgtcagcagtacgcacgcaccggataaaagcggggtaaataagctcgttacacagccgtcaaacacgtacgaaaacaaatggagggatatatcctgttcggtcatgtcatactcttcccgtctccattgcaatgtattggcaataccgtgatgatctactaaaacccctttagggcgccccgtcgttcccgacgtatagatcaagtaggctagatcacctggcggcatatttggagcttctgtttggtaactttctgtatgttctatcgttatcgtatttccttcataggacggagggatcaaggaaataaggtcttcttctatcagcaattgagccgcttgactgtccttcagcaggaaagaaagacgttctgctggaaaatgtggatcaagcggcatataagcgccgcctgctttccaaatcccaagcagagctgcaggcatttccattgaccggcccatcatcacagccacgatatctccagatctaacgcctttttctatcagggcgtgcgcaatctgattggctcttatatttaattggcgataggtccagcaatcgtctcccatttttaatgcagccgcttcaggtgttttgcgggcttgttcctcgaacaattggggtatcgttttgttcacataaggacgctcagtttcgttaaacgattggataacctgttgctcctccggcggcacgatattgatgtcactgacggcaacatcgggatttgtcaaaatgcaatccagtgcttgctttagatgcccctgaatcctcagcatctcctcccgctcgtaaacgtctgcgttgtagctgaatttgatataaaatgattctcccggaacgataacgatattaaagtcgtaattggtttgttccgacattgaaatgtcactcagcttcagagcgccttcgtcattttcactctccacgcttaatgcctgatgaagctgtacagggtaattttcaaaaacaaaaatatgatcgatcaacccttgcttcaatggactatggttttgaatttcataaagcggataatacccatgctgttcagatgataaaatatcctcctgcacggctttgaccagcgaagaaaacgttatgccttccgcagatcggattcgcactggaacagtattgataaacaagccgaccattgattcaatcccgtcaatcgctgacgggcgtcccgaaatgacggagccaaaaacggcatcggcatcatctgcagcattatatcgatggagcagcacgccccaaatactcataaacaacgtgtttaatgtcactccccagttttgggcagcctctgtcagtttctcaaccatttcctgcgctaatgaaaagctgacctggtcggctttataattcccgtctgccgtgcggcgctttattcggggaatagaagcagtattgccgtactccttcaaatattcgctccagtaggcagcggtctcttcttgatcttgttctccgagccattcaatataacggctgtacggcaccgtgctgccaagctgtacaggtgagttatttttgagcgaatcatacatgctgaaaaactctttaagaataatgccgagacaccacccatccatgatgatatggtgatgtgtccagacacatgtatattggctgtctcctctatcaaaaagggcaagacgcattaaaggatctttttgcaaatcaaatcctttttcccgatccttagtcataaaagcatcaatcagcgtctgctgttcttgatcagccaggcgagaaatatcttctctatatactgtcaattcccggtttgataagactacctgctgcggacctgtaagatctggtacttctttaatgaaaatcgttctgaaaatatcatatctagaaacaagaaggtttaagctcttttgaaacgagtcgacgcatagattccctgtgatcgtaaacgaggtctgttcgatatatgctttcgagctgaaatccattaatgaatgaaacagcattccttcctgcatgtgcgataacggataaatatcttgaatttgtgccgattgtgccatcaattccacacaccttttcaaaagttaaagatctttcacgagatcttcgatgctagataatgcagacaacgttaattccttattgctgaaatcgctcaatgttttttcgcgtgcttttttctgcgaacaatgctcaatcgtctcgataagatgcctgtgaaaacgatccataaaacactcaattgagtgtttgctgaacacctgggtgtataccgcttttacttgaagccgtccgtccgtaatgagagcgttaatgtccagctcatactctcgttctctctcacccgctatttcgtaacggggctggtaatatgataattgaaacgtatcagcttctttctcttcgctaaattgaccgagataattaaagctgacctcaggctctttatgccgcagttctcctatgtgtgttaacaatccgtatccagttcctttgttcggtactcttctcagcatatcttttgtcatcttaattcggtatgcgagctgatcctcgaaaggctcgggaatacccatgtctagcagaataggataaatggaagtaaaccatccaactgtccttgaaatatcaatgtttggcacatgcccttctctaccgtgtccctcagtgctgatcacgatttggtcatgcccagtccattcagaaagcgccaatcctaaagccgtaagcaaaagttcgttggcatcagtaccataggcttgctgggtttcaaacagcaatttttcagtccagtctccggatagtacaaacgcggctgcgtcgctattcatttggagtctgtccggcacattttctatgtccttaggaagaaaagcagtgtgagcgtctaaaatcgtttgccaatacgttttctctgaaagcaattgtttactttcagctatttgggtaagaccatcggcgtaggataaataagaatccgtttttggcggtaattggatttctttcttttctaaagcctgttgatatgctgcagctaaatcttcaagcagaattctccaagaaacgccatctatcacaagatgatgaagtgcaatcagcaaatgatccccttctgccgttttaaacaaacctgcttgcagcaaaggccctttttctacattcattttgctttgaatgacggtttcctcagcggcaagtttttcatcaagatgagccctttccagcgatgcttttgtccaatctgaaatataaaggccaaacagttcatgatccttgtgattgattccgcgattaaactgaatgacatggccgttttggtcacgttggaaaatcatgcgaatggcatcatgatgctcgattattttacgcagcgctagatgaagcgcgttagcattgaatcctttttcactgaaaagcatgacggactggttgtaatgatagtgaaaagcatgtacctgtccgaaaaatcttcgctgaatcggggtgagttcagcttcaccttccgcaggtccctggtccgcttgagatgccaatggtgtgatatgtccgcatagttcctgaatcgttgaataacggaataagtcgcgtattgtcatgctccagccttcagctgccagacgtgctgccacttgtaatgctttaattgagtctccgccaagctcaaaaaaggaatcgtgaatgccgactcgtgacatgctcagtacatcttcccatatatacgccatcgttttttgtatgtcgttaactggtgcggtatatggacgcgataacacattatttggagccggcaaggcatttctgtccagctttccgtttagggtcagcggcatgttttctaaaggaatcagatgtgcaggaatcatatacgctggcagctcctttgttaaagcagcacggagagcattcgtattgacgtctgaaggcacaatatatgctgccaaaccagcctgtccatttttatcatgctgaacggcaacagcagcttctctgacaagccccgtttgaagcagaacactttcaatttcttctgtttcaattctgtatccatttatctttacttgataatccattcggccaagaagcctgatcgttccgtttggaagccagcatgctcgatcaccggttctgtacagcctttctccagagacaaatggattttctgtaaatttcatttgcgttaagtcaggtttatgatgatagcctttcgcaacacctgccccgccgatgcacagctcgccggcaacaccgatcggctgaatttgatcagtctggctgagtacgtacatgtgtacattcggcagcgggctgccgattggtacgttatctcccgtacactctccacccatactggtttcatagaaactcgaatcaatggttgcctctgtgacaccatagctattaatgatgcgcatgctttggccaaagcgatctgtcaatgttttgaaatcttgagctttcaccatgtcggaaccaaggatcagcatgtctaagtcaggaagcttgaactggttacggtatacatactccatcaccgggataatgagagccggtgtcgactccatcaccgtgattctctgagagttcatgattttatatatttcagcaggttccagccgtgtttcatctgggcaaacgattagagtcccgccgttggtcaatgttctcgccaaatctcctgagaagacatcgaatgaaaagctcgcgatttgaagcagtctgacaggcttccgatccagttcataaatttgacgccaagcaagagcagcatgagtaaagttctgataggtgacaataacacctttaggcgcacccgtcgttcctgacgtataaatgatatataccggctcttcaggagcaggagataagttaaggttgcagttactttcttcataagtgctttcatcgtcaaggcagatatgagacatctcagattcaggcaagtttgaaatcaaatgcttcaattcctgctgtgaaagtagaatatctgccccgctatcacgaagaatatattcaatacgggcttttggataatgtgaatcgattgggatatacactccgccagctttcatcactgccagcactccaacaattgcatcaatggaccgcttggctaaaacagccacagttggcttcggtccttttctgttttgcaatgttcgtgccagacgattggctctttcatttagaagccgatagctaatctctgtttcgttatcaataacagctatatgttctggaatttcttcagctttcgcttcaaatatgcgatgaaaaggaacatctttttgagcaaattcaacctgagttttgttaaattcaaagactattttttgtttttctttatcactaagtatgtttatttgtgcaaggcttgtttcaggggttgaaagtgccgcatgcagaaattggataaaatgatcagcccaccgttcaatcgtagcttttaggaatacttctgtactaaattccatttcgcagcaaatagatccacttacttccgtagctattaatgtgatatcaaataaagaaatgtaatgtgcgaaattggcaggccggacttttatttctctcagatctatgtcctgtttttccacattttgaaggataaacatcgcatcaaacactgggttccggctcatatctcgtgtcaattcaagcttatcaacaagctgttcgaacgggtaatcctgatgctcaaaggcttccaatgctgtctcacgcacttcctgcaaatactgtacgaatggcttcccgccctccgggcgcgtccgaagcgccagcgtgttcacaaacatgccgagtatcgtctcaagatccttgtgcggccggccggcgattggcgagccgacgatgatatcttcctgtccgcttaagcgtgacaagaacgcggtgtaagccgcaaggagcaccatgtacagggtgcttccgttttctcgtgccagcttgtgaaggcctgatgcaacctcttgatccagcgtaaatgagaccttgtcaccagcgaagcttcgcaccggcgggcgggcatgatcagcggggagatccagcacaggcagctcgccctcgagctgcttcagccagtacgcctcttgcgttttgtacgcgtctcctgttttgaatccttcttgccatacggcataatctttatattgaatgcgcagcgccagaagcttccgattattgtacagctcgccgaattcttgaatcagaatgttgacggaaacaccgtctgaaatgatgtgatgcatatcaaccagcaacaggtgccgctcatctgatacctttacgatttgggcacggaacagcggcgcttggctgagatcaaacggtttgataaatgcggctgcggcctcctgttcggttcgttcgccgagaactgtagtctgtaacgtaaacggcacctcgtcatggatgcgctgcaccggatcgcctccttcgtcctgttcgaaggcggttcgaagcgactcgtggcgcttgatcagctcttggaaagctctgtccatcctttcagggttgagcttcccttcgagctctaacacagccggcatattgtagcctgtccctccgtcttccagctgctgaaggacataaatccgcttttgggcagaggaaaccggataggtttcctgtttttcagcgggcttaatcgcttcatatggactgtccgttccttcacggataacggcagccagtccttctactgtcggatgggcaaacacatcttttagcggcacctgtacatcgaattctttggcgatccgtgagacaagcgccgttgcttttaaggaatgtcccccgcggtcaaaaaagttgtcgtgaatcccgacagggccatttttcagcacgtcctcccacagctgagaaagcttcatctcagtcacgtttctcggcgccgtgtaggtctccgcatctgccgctccgccaggagctggcagggcgtttcggtcgagctttccgcttggcgtaaccggccactgttccatctctatcatataggctgggaccatgtagcccggcaacagtctctcaagctgtgcacgcacttcgtttctttggagcccttctacataagcgcataattccggctccccgctgtctgtccgtacggtaacagccgcctctcttacgccttctatgcttcttagtgccgcttcaatttctcccggctcaatccggtagccgcggatttttacctgatcatccgtgcgcccgaggaattcaacattcccgtcagggagccagcgcgccacatccccggttttgtacatgcgttcccccgggtaaaacgggtcttcaagaaaacgctcctccgttaatgccggccgattcaaataacctctggcaacacccgctccggcaatgtacagttcgccggcgacaccggaaggctgtacggctaaatgcggatctaaaacatacaaacgcgcaccgggtacgggcttcccaatcggaatccgcaaacgatccctgtcccgttctggatccaatacgtaaaatgccgcgtctaccgttgcttctgtcggcccgtaaccatggattaatgatacctgcggcaatacagaagcaaaacgggctgccgtacgcggcgcaagcggttcacctccggcgaatacacgcttcaggcttgtgctgtcacgcaacctttcgatttccgcttgatcgagaaagctgttcagcatagccggaataaaatgagccgttgtcacgttttcctgatgaatggcttttacgatcaatgccggatctttctcccagccgggcggaagcagatacgccgaagcaccggaaagcgaccaccaaaacagctgccacacagacgcatcaaaggaaaaagaggttttcaccatgacaatgtcatcttccgaaagcggaaactggtgctgcatgcctgtcagaaaggaaacagcctggcggtgctcaacggccactcctttcggctgcccggtagagcccgatgtatagatgacataggcgagagatccgccgtcagcaggagtaaactcatggttttctgctttttcgctcgcaagagatgtcatgtccacttcaagcgtttcgccagaaaagtttggtgcggagcatcccggctgtgtcagcaagagcgatgccccgctgtctttcagcatgtagctcagccgctcctttggatacgcaggatcaagcggcaaatacgcccctccggccttcaatacagcaaggacagcgatcagcatgtcaggtgaccgttcagacaggacaccgacgatactttcgtttgtgacgccgcgtgccgcaaggtgcgcagccagccggctggcgtacatatcaagctcagcgtatgtcagcgaaccgcctgaaaagcgaatggccagccgctccggtgtgaaagctgcctgtcgctcaaacagcccatgcagggtgaaagctttaggcgaaacagcttccgtcttgttaaactcatacaacaatttttgcttttctcttgtattcgtcatatctaattctcttataaagctgtgcggatgttgaagggcgttttccagtatggtaagcaaatgagattgtattcgtttaatatcctcaagagaaaacaaggtattttgatagtcgaaatttaattgaatggttccattgtctatccgttcttgtatttgaactgaaagctcattcgcggtgtatccgctgaaataaagcgctgtttcatagtcaaaatcatctgcattatgccactgaagtggctgatactgcatagatataccgataaggttgtgtaaatccttctgttcatttcttaattcatttacaagcaaattataaggaaaccgttgatgacgcataacagaaagctgttccctgcctattgtgcgcacaaaggaaagaaaatctgtgtcaggatcaaccgttattctgattggaagggaactaacgaacatgccgagcatttctttttcagcctttgaacctctgttgccatagtaggtgccaatggcaagatcttttttagaagtgattctgctgatgcatatgtaaaatgaagccataaataaggaaatgatattgatcttgtgttcttcgcagaagattcgaatcgtttgctctagatcaggtgaaagaatgatggtgtctctggatgcagatgtgctctgtttttgtaaggacgtctggtcggctaacgagtggtattccaacgggtgctcaaaggtttgtgtccaaaataaacggtcctttgcaaaccgcggagattgtagatattgactctctttttcgatgtagctcaagtaagaaggttccggctgatcaggtaaaggatctttctttttcattttttgataaagatctataatttgatttcccatcacatttaaagagattccatccattatgatatgatggaatttcgcaaatagccaaacttcatgagagtcaattctaaggaggtaaaattgaaaaagaggcgagttgaacagtttaaatggaatgctcgcttgatcctgaatccattgctctatttctatcatttcaacatttgaaaaatcaattattctaagtggataatatttatattcagtaaggtgcaatcgcggctcaagctcttctccttctaacagctgaaatctaatggcgtcgttgcgggagatggaatgattcagtgctccctccagagtatcaagctcaatattgcctttaaatttcacacaggctgtgagattgcaaatactggtatctggctccagcagttcggtaaaccacactctcctttgggcatgggttaaagaataagtatgttcgctcaacggattccctccagttctcataataagaggataagaaaatgtagaaaaaagcagaaaaatgacaataaaagaaattatatgactatataatccatatatgcactatattaacggatattttttaaagtacaataaaaaacattaaatttttataacatttttttgaatatagtattatttctttatttttcgtttctttttttatcaaatttccggatataaagtgataaaagtattgttttacataaggtcttatacactactttttaatcggactaatttgcttttgcccatcattcttctaattgttggaaggttcgacaaagcgttattacagacataaaaaaacctgttttctcttggaaaacaggtctgccgctattattgatttgccaaaatgacagcgatttgatcctcaatatcttttccatcctcttcatcaatcaatccatttagaagaatagagaaaacaagtttttttccgctctttgtttctgcgtaccccgatagagagcttaccgtactgagcgatccggtttttgctcttacttttccttgtgcaggagtgtctttcatgcggtttctcagcgttccgcccaccattctgtcaggattgcccgcaacaggtaaagaatttagataagccgagaaccaactctgatcctgaatgtcatataacagctgtgaaagttgatctgaggatacagcatcaatatgtgagattcctgatccgtctcttaagacgagtgatttagaatcaacaccaaattccggaagcgtactgtttaacacttcgagccccttttcccagctcccttctccttttttcactttccccatctcttttacgagcacttcggcatgtccgttattacttaatttcatgaacggcacaaaaagtttcgataaaggcattgagcgatgagagagcagcacatctgaagaactaggtgcttcacccgtcttgatgtcccctttcacagtaataccttgtttttttagtgactgcttaaataaatctaaggcatatccggcaggctcccagacagaaatccattcctttgtcttgtttgcgtcaaccggtacgctcccttcaattgtaatcgtgtttgttccatgctctctttcgattgtgaggtctttctctgaaccggcagcagtcgtttcagcatcgttctttatcgttatataatcggttttcggagagacagacacggcaggctcttccccttctttttgatttggggtgacctcaacaatcacagtgcctgcatcatagtcttcgtttggagacgctgttagagcggagattggcgcgccataatatgtgtattcatcgctccaaggcatatcaggtgataatcgcatgtcatcatgccacgtatcatcaccgatcagattgcctttaattacttttacgccggaatgtttcaatttctcagccattttgtcaaaatcagatggtaaaagtgtcggatcgcctttccctttcaaataaaggttaccattcagctttttccctttcagtgttccatccgtccggacctcggttgtaaaagaatagttctcgccaaggacagaaagtgccgcggccgctgtcaaaagctttagagaagaggcaggcctcattcgggtgtctcctgaatgttcatatagaacagcacctgtttccgcagagcgaacggtgatgccggccattgcgccttcgagggcaggatgatcagctaaaatcttatcgatctgcccggaaagtgcatcttgtttttcagcggcaagcgcagcctgatgcatataaggcaccgaagcaacgacgaaaagcagtaaaacagcaacataaagctttatgctttttttcattcatttccccgcctctctgcgcttcatcattggctattgatgattcagttcaatggtgatactgcttttagctgtcgtttcttctcccggctccagcacttgtaaaccagtgagtgacgaaggtaaatcaagattcactgcgtttgtcacccatgtgtaaggctcagggcataaatacccttgttttccgtccgcattgtatacaacccaatgtttaaactgttcatctgccttataaataatgctattatgtgcatgctgatgataaatgactgcctggttttctccgcccctcttctgataagaagataaaaagacatcatccagctgcttgtggcgcaaatccattccttcatgcaaagcttctttatacgggacatccatcagtttccctgtcggcagcaggcgttcatccaactcccattgctgatctgctgtcagggaaaataatgagctttctgccggaaatataaatgtagtatgataaccaattccccaaggaaacgcttcctttcctttgttcatgaccgtcgcatgtttaaatagagtattcccctttaccgtgtatgtcatccgaacgacggcatggtgaggaaattgcttatacacatgggggagcccagaaagatcaatttctgtttcaacaatcacttcttcatcagttttcttcgcggtcactacgttccacttttcatggtaaagaaacccatgaagatggttgtgtttatccttctcgttgatatcaaaatgatacgttctgccccggaaactgaatgtaccgtcacttatgcggttaggcgggaacaggattggaatgccatacaatgttggtgtgtcgtgaaaactttctgctgtttccggttcacgcaaaagctggacatttgttgttttgtccacgagagaaatgacgttgctcccccactcagggacaacaatcatttctagatgttcgttgcccgctttgatggccggcgttcccaaatacgtgattttctcaataaagtttgccatgtttactcaacctctccttgattcattgctagtataagaattcaatgtactgtaccatatttcctccattttatattttcccctatcaaataaaaaaacaccgttcaaacttatgaacggtgtgattcggaggctattggatgagacgtgtgatttgtttctttttccagacgaattgataatacccataaatcaacagcaagctgacggcaaacgcagctggataaccaacccagacgccgagtatttcaagctttgtatagtgagaaaggacgaaagcgacaggcacctctactccccagattgcaaaaatactgatgacggtcggccataaaactgttccgcttgcccgcatcgttgcagaaataatttgggcatttccaaacagcaaatagctccacaatgtaatcatcaaaagacggtgcgcaatgtaaagcgtctcttgctcggttaaaaataacgataaaatctgatgtgaaaaaacatagatcagaatgatcagtacgccgccaatgatataattcagccaaatccccacgcgaatgacctgctttaagcggtcaaactcgtttgccccaatcgattgcgcagcgaaaatagaaaccgcaataccaaggctgacggccggcatctgtacatagctggctacctggttgaccactccgtatgcagctgttgcattagagccgtaatgattgacgaatgaaataaccgctatctctgataatgagacaagaatcatattgatgcttgctgggaccccaagacgcagcaggagaaccagcagttccttatccattttcaaataacgacgcactgttttatcaaattgcagcgggtgttttcgctttcgtaaatacaccattaacacgagaaaagtcgcaatcgtggaaatgacagttgcatatgccgagccgtatatgcccagtttcggaaaaccaaacatgccaaggattaaaacaggcaaaagcgcgatgttgatgaccgtgctcacaatcagcgtataaaacggtgtcttagaatcccctgttccgcgcaaaaaggtagtatatgcaaaatataaaaacataaacggcatagcataaaataaaatacgtgcatagttagcgctgacatgaatgacattttcaggcgttcccattaaacgaaggatatccagggtgaaaatactgccgatgacggctaacacaacgcctaataaaaatgtaaacgtgagcgtcgtcccgacaacagcctttagccgttcctcatttttcgctccgtaagcttgtccgatcagaatcgaactacctgaaccgatcccaatcgtaaatgagattaaaagaaaaaataacgggaaaaaggatgatacagctgccactgcatcaacaccgagccatctgcctacagccatcatcccgactagctggccgactgattgcagcacattgctcagcagaagcggcaccaaaaagagtgacatcgaccgccaaactgatggtttgcttttcttttgagttacaagaggttcttgtgatgtttccatattaaaggactcctttatttgaaatcgtttttaaacatgccctcattttttgacaaaaacaggatatgcaacatgttattattcatcactgcacatatgaaacccttcccgattcttctaatttcacacatctttttagcttatgaagaataaactagcaagtaatggcgtattttttgtgagtaaaagaataaaaaaataatttatgcaaaagtattgtaatctatccgtaattattgtaacatttgtaacataagagaaagagattttgaaggagagagcgataatgaaaaaatgtcttctatttctaacaaccattgcacttattctgtcattaagcacaaatgcatttgcgaaaaatacatcaggcaatttatcacaaaaacaagcattacagttggcattatccgctagagaacatttttggaacaccatgagcggccacaatccgaaggtgaaaaaagcagtttgcccatcaggcacattcgagtatcaaaatcttcaatatgtatacatgtgcagtgatctaggcactaaagcaaaagcggtgaattatttaactcctatttttacaaaaacagcaatcgaaaaaggctttaaagattatcatttcactgtttcaaaaggaaaacttgctgttccaatcggtgacggagacaatcttttgaattggaaaaaatcaactgctaaactgatctctaaaaaaggcagcacaatcacatacgaatttaccgtccctacattagacggatccccttctgcaaaacggaaagtgacatttgtgaaagaaaataaaaaatggaaagtcaatcaatttgacgcagttatataagaataacgcccggtataagcgggcgttttttatttggtctgcataaagaaagacaacaggcgaaaagtgcctgttgtctttttgtgaatataacgctctaggagagattcgaactcccgacctgcagtttaggaaactgctgcactatccgctgtgctactagagcttttggtatttatatagtagctctgatgatcaatattttcaagcgatttgtattaaagccctccaaaaaccttatatgcggctcttgtcgtatcttcatcaataccgatataccgcattgtaattgatggtgatgaatgattcagtattctctgcagctcggcgatgtctttcgttcgctgataaaaatgatagccaaacgttttccggagtgtatgcgtccctatctcctcaagtccgcacgccgcagcggcctctcttaaaattctgtaggcctgaatgcgggaaatcggcttcctggtgcgcactgatttaaaaagatattcgttttccttcatgtctttcgtatactcgtatatttcctgtttcagcgattctaaaataagaatctttcttttctttttcgttttgctttcagtcgcccataaatgatctttattttgaacgtccttcacttgcagcggcagaatatcagaaatgcggagcgcgctgttgatgccgaaaataaacagaaaataatcccgcttgtttttgttaagcaaatactgtttgacttcttggattttctctagactgcgaatcggctgtacaatatgcatcaaaaaactccttaaaaacagttatgtaacgttttgaggtctatgttactattatagctgaaaaacgttgaatgtcaaagtgcggcggcgtttatgtaacataatatacatagtgttacataagcttttaaaaaagcttcttcaaaccttcaccctataaaataagctttaaagcctcttataaagcttttaacctcttggatacttatccccctactaatcatcaaaaatcctcttaaaacgcaatctgacgctcccaattttctggagcttccgcaaaaaaacataaaaaaaagacacaacttcaaattgtgtcctaatcctcatcctttacatcaatatcttccgggattggttcatttaatatttcctgcacaagtgctttgtaattctccagctgttcgagatgcgttttgaactgctctttataaatcaaaaattgctctccgtcatgaacggctctgattttcccttcgagcaccaagcttttaatataatcctctgaaagatttgtatattctgctgtttcttcaatcgttaaatacatatagcagtcccttcttaatccgtatgctgattctaatatagcacatggctcatatcaatataatcaattttgcacagaaaaacggcattatgcactatataatataccatttgtcacttgtgaaaacgctgtaatttttttacgctaagattgtaacaatacagcttcatataggagggagaacatgaaaagaacgtggaacgtctgtttaacagctctgcttagtgttctgttagtcgctggaagtgtcccttttcacgcggaagctaaaaaaccgcccaaaagctacgatgagtacaaacaagtagatgttggaaaagacggcatggttgcgaccgcacatcctcttgcttctgaaatcggtgctgatgtgctgaaaaaaggaggaaatgctattgacgcagcggttgccattcaatttgcactcaatgtaacagagccgatgatgtcaggtattggcggcggcggttttatgatggtgtatgacggaaaaacgaaggatacaacgataatcgacagccgtgagcgtgctccagcaggcgcaactcctgatatgtttctggacgaaaacggcaaagcaattcctttctctgaacgtgtaacaaaaggtactgccgttggtgttccaggcactctgaaagggctggaagaagccttggataaatggggaacccgttcgatgaagcaattaattaccccttctattaaactcgctgaaaaaggctttccgattgattcggtgttggcagaggccatttctgattatcaggaaaagctttcacggactgccgcaaaagatgtatttttaccaaatggcgaaccgcttaaagaaggagatacccttattcaaaaggatttggctaaaacatttaagcttattcgctccaaaggcactgacgctttttataaaggaaaattcgccaagacgctttctgacactgtccaggatttcggcggatcaatgacggaaaaagatttagaaaattacgacattacaattgatgaaccgatttggggagattatcaaggctatcaaatcgctactactcctcctccaagctccggcggtattttcttattgcaaatgctaaaaatccttgatcattttaacctttcacaatacgatgtccgctcatgggaaaaatatcagctgcttgctgaaacgatgcatttgtcatatgccgaccgtgcgtcttacgcaggtgatcccgaatttgtaaatgttcctctcaaaggcctgcttcaccccgattatattaaagaacgccagcaattaatcaacctagatcaagtgaataaaaaaccgaaagccggtgacccttggaaataccaagaaggatcagcaaactataaacaagttgaacagccgaaagacaaagtagaaggccaaacaacccactttacagttgctgaccgttggggaaatgttgtttcttatacaacaacaatcgaacagctattcggaacgggtattatggtccctgattacggtgttattttaaacaatgaattaacggattttgatgcgataccaggcggagctaacgaagtacagccaaacaaacggcctttaagcagcatgaccccgacgattttatttaaggatgacaagcctgtcctcacggttggatctcctggcggggccacaattatttcatccgttttgcaaaccattctctaccatatagaatatggtatggaattaaaagcggctgttgaagagccgagaatttatacaaacagcatgagctcttaccgttacgaagacggagttcctaaagatgtcctcagcaagctaaatggcatgggccacaaattcggcacaagtccggtggatatcggaaacgtgcaaagcatatcgatcgaccatgaaaacggcacctttaaaggtgtagctgattcaagcagaaacggcgcggcgatcggcattaatttaaaacgtaaataaattaaaaaactgtactcgcttcaaatgagtacagttttttatacacatctttaaaataaaaactgacaaacgtctttattctgctaatgcacgtctatcttcatcttttcatttcgtttatctcatcaagaaatgtctgaaacgcactcgtaataaaaaagtctttcctgtatataaagacgatctctaagtcttgatatgctggtggcagctgatgaatccatacatttgtacgatgctcggagcagtcaacagcggactttgggagcagcgccgtacccatcccggcggaaacaccttttataatagcctccaatgtgccaaactctatgattttttgattgtgtatgcctgcttcctctagtaatcttttgaccctgtcacgatgagaacagccagccccaaaaaagagcatcggctgctgaagcatgtcttctgccgtcccttctcgtgatgaaatcaaaactaattcatcataggagacatggagttgtctaaccgcagcgtgttcaaccggcccatatacaaaagcgccatcaactttatgatcaagaacctgttgaatcaaatgatgcgtatcagctgtgttcactgataaatccacttcaggaaaacgcctgaggaaggatgctgcatgctcaggcagatgcgttaccgccgtcgtttccagtgatccgatccgcaaaggcccttttggttgcctgctcattcgggtcgatttttcagcttggtctaacagcgataatacttgatctgcatattgtaaaagattttctcctgcagcagtcagcttcattccccgattcgttcgatgaaaaagcctgatattcaaatcttcctcaaggttatgcactctggctgtcacattcgactgaacataattcagcatttgggctgctttcgttatgcttccttcgcgggcaacagcctgaaaaatctttaaatctccgctttccacgcgctctcacctgcttgctatgatgaaaagtgatattggctatcatatttgttcattttactcgaagaaaaccgctatgtaaaatatgtaaagatatgaaaatacaattcaatgaggaggcagacagcatgaaagctataattcacaacggaaaagccggtcttctggggttatcagttcaggacgttccatcaacaaagcctggatacggagaggtaaaggttaaattaaaatctgcaggcctgaatcatcgtgacttgtttcttatgaaaaacaaatctgaacaagatcctcacataatactgggttctgacggcgcgggtatcatcgaagagattggtgaaggcgtgaaaaatgttactgttcagacagaagtagtcattttcccgacattgaactgggatttgacagaaaatgttccacctgtacctgagattctgggaggtccttcggacggaacacttgctgaatatgtgatcattccttcacaaaatgcaatcaaaaaacctgcttatttatcttgggaagaagcgggcgttttacctttatccgctttaactgcatatcgggctctgtttacaaaggggcaattaaaaaaaggcgagcatctattgatacccggcatcggcagcggtgtagcaacctacgctttatttatggctaaggcgattggggcaacagtaagcgtgacctcccgcagtgaggagaaaagaaaaaaggcgctgaaattaggtgctgattacgcatttgacagctacagcaattgggatgagcagttgcagggaaaaaaggcggatgttgttcttgacagcataggacctgccctcttttcggaatacttccgccatgtaaaaccaaatggccgtattgtcagctttggggcaagctcaggggataatctcagttttccggtgcgttctctattctttcctcaggtcaatgttttgggaacctcgatgggaagcggtgaggaatttcaagctatgctcgctttcattgataaacataagctgcggcctgtaattgaccggatatatcctttagaaaaagcatgtgaagcatataaaagaatgcaggaaggcagacagtttggaaacatcgggatcgtaatggaataaaaaaagaaaccggctggcagccagaccggtttctcttatatgataatcccctttatttacggaagaactgaactccccatcaaatatcgatccacttcacgcgccacttctcggccttcattaatcgcccatacgattaagctttgccctcttcttgcatcccctgcggcgaatacaccatcgatatttgtttgataatccccatatgctgcactgattttgttatttacagaatcaacaccgaactgtttcaacagcggctgttctgtgccttcaaagccgatagcgataaagacaagctgagcaggccatactttttccgttccaggcagctcgcggaactcgtatttcccatgctcatttttcactttttccatttggatggtatgaagctctttcagctttccgtttttatccgcaaccatttttgtcgtttgaatggagtattctctcggatctcttccgaattttgcttctgcttcctcgtatgcatattcaagcgtaaagacgtgtggctgttcaggccacatattgtcattcgtgcgggctggcggaagtttcgggtgtttgccgaattggtgcacgcttttggctttttgacgcagagcagtagccacacagtcagctcctgtatctccgcctccgattacgatgacatccttccctttagcatcaatgaattgcttgtctttaaaattagaatctaaatagctttttgttgcaagtgtcaggtagtccattgcgtaatggactccttttgagtcgcgtccttcaattaagaggtcccgctgtttttgagcgcctgtgcataggatcacagcatcaaattgctcctttagctcatcagctgtaatatcaacaccgatttctgtgttcgtgacaaaatcaattccctcttgcgtcagcaatttaattcggcgttctacaatgcccttctcaagcttcatgtttggaatgccgtatgttaaaaggccgcccgctctgtctgagcgctcaaaaacagtgacagaatgccccgcttgattcagctggtcagcactcgccagtccggctgggcccgacccgacgatagcaacttttttgcctgttcgtttttttggaattctaggttgaatccagccgttctcaaatcctttatcgataatggtccgctcgatgtttttaattgatacggccgggtctgaaatcgctaaagtgcatgatccttcacaaggagcgggacatacccgccctgtgaattcaggaaagttgtttgttttcaacagacgttccaatgcttccttccatctgccccggtagacaagatcattccattcaggaattaagttgtaaatcggacagccggatgtaaatccgttaatgtccgcaccgatctggcaaaacggtgtaccgcaatccatacaccgcgccccttgccgtttcgatgcttcttctgaaaaaggagcagaatattctttccaatcctttaagcgagtgagagggtcccgctccgcaggtttttctcgtttgatctccataaatccagttggtttccccatgttcctctccccttccttactgtactaccgcttgtttttgtcccgatgctgctgtattctgctttggcttcgtgttggcctcaaaagcgaacatgatggcttcttcatctgataaacctgcagctttttgctcttcgatgcttgcgagcatttgtttatagtttttcggaatgactttgacgaattttttcacactgtcttcccattgatctagcagatcttctgctttttggctgtttgtatacgcagtatgtctttcaagcattgctttgatttgctggatttctttctcatcctctaatgattcaaataaaatcatctcaaggttgcatttgcgtttaaacgctttgacatcttcggtcagtacataagcgattccgccggacatacctgccgcaaagtttttgcctacatcaccgagaacgacaacgctgccgccagtcatgtattcacagccgtggtcgccgatgccttctacaactacgttcacaccgctgtttcgaacggcaaagcgttcaccagcacgtccgttaatatatgcttctccgcttgtcgcaccgtaaaaagccacgttgccgataatgacattgtcatccgaagcagagttgaatccttctggtgacttgacgatgatttttccgccagaaagcccttttccgacgtaatcatttgagtctccgtctaaataaagcgtcatccctttaggaacgaaagctccaaagctttggccggctgatccggtaaagtgcaacttgattgtatcttcaggaagaccttcttctccgtaacgctttgagatttcactgccggttatcgttccggctacacggtttgtattgttgatttcgatagaaacttccgcttcttttccagattcgatggcttcttgtacggccgggagaatcgctgtaatatcaagtgattgatcaattttatgattttgcggcgattggaacgtccgcaccccatcaggctgataaagaagggtagacaaatcaagctggcttgctttccagtgctcctttgcccgttcacttacatgaagtacatcagtgcggccgatcatttcatcaaatgtcttgaagcctaacgcagccatatactcacgaacttcttcggcaatgaacagcatatagttcacaatatggtcaggatctcccatgaactttttgcgaagctctggattttgtgtcgctacaccgacagggcatgtatccaaatggcaggcacgcatcatgacacagccgagtacaactaacggagccgttgcgaaaccaaattcttcggcgccgagcaaggcagccatcacaacgtcgcggcccgtcatgagctttccgtctgtttctaatacaacacggtcacgaagtccgttcagcattagtgtttgatgtgcttctgcaaggccaagctcccacggaagccctgtatgtttaatactggttttcggagaagcgcctgtacctccgtcatagccgctgatcacaatgacatctgcagtcgctttggcaacacctgcagcgattgttcctacacctgcttttgacaccagctttacgctgattcttgcgtcacggttggcatttttcaaatcgtggatcagctgggctaaatcctcaatcgaataaatgtcatggtgtggcggaggtgagattaatccgacacctggcgttgacccgcggacatcggcaacccatggatataccttgttgccaggaagctgcccgccttcacccggcttagcaccttgagccattttaatctgcagctcatcagcattgacgaggtaatggcttttgacaccaaaccgtccggatgcaatttgtttgatcgcacttcttctatcatcgccgttctcatctggaacaaagcgtttgggatcttctccgccttcaccgctgttgctttttcctccaagacggttcattgcgattgctaaagcttcgtgcgcttccttactcaaggacccgaatgacatcgcacccgttttaaaacgtttgacaatcgattcagcggattcaacctcctccaacttcaaaggcttgcggtttccgtcaaatgcgaacaagttccgcaaaaatccgatgcgttcttcatcagccgcttttgtatactgtttaaacagattgtaatcatttctgcggcacgcccattgcaaagtatgaatcgttttcggattaaacgcatgatgctctccgccatttctccattgaaagtcacttcccggttcaagcgttttgctgtaatcatcctgatacgcttcccggtggcggcgctgtgcctcttctgcaattgtttgtaaatcgatgccgcctagctgtgatgcagtacctgtgaaatagcggtcgatcacatcgcggctgattcctaccgcttcaaagatttgggcgcctctgtagctttgcacagttgaaattcccatcttggacatcacttttacgacgccctcagtaatgctttttccatatttgctgaccgcttcttcatagctgatatccaaacggccttcatcaatttcctgcttgtaggtcgcataagcgagataagggttaatcgcatctgcgccataaccgattaacgctgcaaagtgatgcacttcacgtgcttctcccgattccacaataatgctgaccttcgtacgcagccctttgcggattaagtgctggtgcagcgcgcttactgccagaagcggcggaattggtgtcagtcgttcgttcatctttttgtctgataaaattaacaaacttacgccttggctgatggctttctctgcttgtgtgaacatgtcctttaatccgcgttcaagatcctctgaaaacagcacatcaattttttggctttttaaatctggatgaacaatcgttttcaatgcgtaaaactgttcattggataaaacaggtgtatacagtttaatccggcgaacatttcgttcacttggatgaagaagatcgccttccgcaccgagccaagtcatcgttgaagtgacaagctgctcacgaatcgcgtcgattggcgggttcgttacttgtgcaaacagctgtttaaagtagttaaacagtgattgcgctcggtcagatagtacagcaagcggagcgtcattccccattgaaccaaggggatctttgccttctttaataacaggaattagatacttttggatatcctcatatgtgtatccgaatgccttctggcgagtaagaagatcactaaattgttcttcttctcttgactccggatcaggatttacttgtacaagctcttcttcaagccatttttggtacggatactcagttgcaatttgtgttttgacttcctcatcggagataatacggccttcttccaggtcgattaaaagcattttcccaggctcaaggcggtttttatataaaacgttctcctgttcaacttcaataacgcctacttcagatgagaaaataatataatcatcttttgtgacataataacgggccggacggagaccattccggtcaaggattgccccgatttgtttaccgtcagtaaatgaaatggctgtcggtccgtcccaaggctccatcagggagctatggtactcgtagaacgcccttttttccttggacatatgcgtattttccgtccaaggctctggaatgagcatcattgccgtatgtgccggtttgcgtccagccatcacaaaaaactcaaatgcgttatccaaaatggaagagtcactgccatcagcattgagaatcggcaaaatcttgtttaagtcctcaccgaagctttcagaaacaaattgctgctcacgtgctctcatccagttgatatttccgcgaagggtgttaatttcaccgttgtgaaccaaataacggttaggatgcgctctttcccatgtagggaatgtattggtactgaagcgtgaatgaacgagcgcaaaagcagaaacgaatgcttcgtcttgcagatcagaataaaatgcatcaacctgttcaggtgttaaaaggcctttgtaaacaatggtctggcttgaaagactggcaaaataaaaatcaagatcttccgttactccccaattttcagcctgtttacgaatgacatacaattttcgttcaaaagataaattgtcctttagatcagaacttgcgccgataaatacctgacggacaaacggacagcttttttgcgctactgttccgatttttccgacatttacaggtgcagttctccatccaagaacgacttggccttcttgttcaatcagtgcattgatttgcttttcaattttttttctttcatcttctttctgtgagaaaaagaccattcctaccccgtaacgttctttttctggcagattgatgtctttgcactcttttctaaagaaagcatcagggatttgaaccagtaagccggctccgtctcctgtatccggatcactgccttgccctcctctatggtctagctggcaaagcatcttaagtccttgtttgacaatgtcgtgagtctgcttgccctttaagtgtgcatataggccgattccgcatgcatcatgttcaaattcaggacggtagagaccttgagcttttggcatttgattgtacgtcataattcctctcccccgatcaatttccgataataccggtcataaaatctaacaactctataatcattgtaggttttcaaaacgatataaacaatatataatttagatcaaaagaatctcaaaatgagatagatggatgtgagacaaacatggagctgcgccaactgcgttatttcatggaggtggctgaaagagaacacgtttcagaagccgctgatcatttgcatgtggcccaatcagcaatcagcagacaaattgccaatcttgaagaagaattaaatgtgaccttatttgagcgtgaagggagaaatatcaaactcacgccaatcggaaaagaatttttgattcatgtgaaaacggcgatgaaagccattgattatgcgaaagagcaaattgatgagtatcttgacccgcatcgcggaacggtaaagatcggctttcctacaagcctcgccagccagcttttgccgactgtcatttcagcgtttaaagaagaatatccgcacgtcgaatttttgctgcgccaaggctcctataagtttctgattgaagctgtcagaaaccgcgatattgatctggccttattaggaccggtgccgacgaatttctctgacataacgggaaaaatattatttactgaaaaaatttacgcgcttgttccattaaatcatccgcttgctaaacaaaaaacggttcatttaatcgatttgcgcaacgaccaatttgtattgttcccggaaggatttgtacttagagagatggcaattgatacttgcaaacaagcaggctttgctcctctcgtttccacggagggtgaggatttggatgctatcaaagggttagtgtccgcaggaatgggcgttacccttctgcctgaaagtacttttgctgaaacaacacctcgttttactgtgaaaattccaattgagttccctcaagtaaaacggactgttggaatcattaaaccgaaaaatagagagcttgcgccttctgcgaatgatttttatgagtttgtcattcaatttttctctaagctggagcagtatcaataaaaaaatgaacccgagcttctatatagaagcttcgggtttttttctgcaaattaatttacaggtaaagaaaaatccacatggcaaacaaaggcttcttgatcaattagagctctgtttgtcagttccttgttcttttccggttcttgaagctgtacagaagagtaattgacgattccaaggccgatttccgtcccttttgaatccattagccgaacaactgaaccgcttttaaatttccctttaatcttctgtacaccgtctaggtataaactcgattggccgtttgttatttttcgtgaacaatcatctgataaaatcatttcaccttccggaccggaattaaaagcgatccattgctccttttgattcaacggaagcgttccttctgcttcaaaataggtgccttccgcctgttcatgaacggcgtgatataaaatatcgccggcatctgcctgaccaaggaaacctttaatgccagacgccattacgattttaaacgcatcaagcttagagcgcatgccgccggtgccaacgatgcttccagtgtcacctgcgcatgcttcgatgtcaggtgttatttcactcacccgctgtatccttttcgcttctggatttgtgcgcggattgccgtcatataatccgtctatatctgataaaatcacaagcatatctgcatcaatcaatcctgcgacttttgccgcgagtgtatcattgtcgccaaacttgagccgattgacggtaactgtatcattttcgtttatgatcgggatgatgccgcgctcgagcagtacattcattgtattcctgacattgttgtatcgatattcatctgaaaaatcgcttcttgtaattaaaatttgggatgcgacatagccgtgtgccaaaaacagctttgaataagcctccatcagcaatccctggccgattgaagctgatgcttgtttttctggaagcttctcgggcctttggataaatccgagtttccgatatcccgccgccactgcgcctgaggaaaccaaaattacttcataaccggcgtctttgagtttgacgacctggtcgaccaacgcttctaattttcgaatgctgatttctccatgaaggcttgttaatgaactgcttccaatcttcacaacgactcttttcatgcttgtatcaggcgtcactttatcactcctgatagcggcgctgcagttttttcgatatcttcgctgatttcctttgaacgcttagccgcatgctttatcgcttgagaaatcgcttctccgccgccgctctttttcaaggcttgcagccccgctgctgtcgttccgttcggtgacgtgatattatctcttaagatctcaggatgttctcctgtttccatgagcatttttgcggcacctaaaagtgtctgtgcgccgatgcttcgagataactgtttatcgaggccagcttcctcgcctgtcttttcaatgaattccattaaataataaaaatacgcggggccgctgcctgcaattccggtgaatatatccatttgattttcttggattgtatagacttcgcccatgcatccgagcaatgcttcggccagcttcttcaggtcttccgacacatattttccaagggcaatagctgttgcagaagcgccaatcatactggaagtgttgggcatcactctgacaaccggctgttcattaagcaatgattgttcaataaaagaggtagttatgccggcaaggaccgacaatattaattgatggggttgaatacgtgattttagtgatgacagagcgttttcggcgtcttttggcttcattgccaaaatgagcacatccatgtcttcaatacatagttggttcggcaaggcgcctttaatgccatattgaagttcaagttcagttaatcgctctgtattgctgcggtttgtaacgcagatgttttgtttcgggattttgttggcacgaacgatacctgatatcattccttccgccatagatcctgctcctataaaggctactttcttttgatcaaagatcggtaacatctcctttgttcgcttttttgttcgcattttcacacgtttaaaatgttaccacgtgaggaaatgatgtcaagtttgaaggtcatcattgatttgtattgtttcttttcgacaaatatgtataatgaaaagcagaaaacacccggttcacactgctgcgccgggtgtttgtttctattaaaaattatctgagagagctttttcaatcagttttttacagcgatccagctctaccttcagctgttttttatatagcttggcggcttcgtaatctttaaattgatagaggacgacttcctggagcttagccccttctttttttactttaatttgttttagtatcccgtcatcaagaagctcatgcaaagaccggtatacttctgtatgatttggtttaaaaccaatctctttaaattcagaccgaagtacttcaagcagctttaacccatagagtctctcttgctctgtcatcgttatcatataaagcttcaaaaatgcgcgctgtttcactaaaaagcctgttgaactccttttttcttctttcatcatatgcactccttcttctgtcactgacaacactatgtactaaatattcaattttcttttattgttttccttctttatattaaagactgatagtccagtcatttcatatttactgattataggtgtagcggaaaaaataaatttcgactgaacatttggtacatagttttcttagttctattatagcctgcattcactgccagcttcaatttaaaacgattgtcagatttgcatatgccggtatgaatttcattcaaataaaaaaacctgtcgaaagacaggttttcatttttaaggatttgttgaccataatcccgctgttttgatgaaaatgcgtggatctaatttcaattgtgccaccatgtactcagcaagatcctcaggctgcatcactttttcagggttaccgtctgttaagttcaattcgatagacatatcactagcgacagtgctcggcgttaacgcgctgactctgatattatgttttctcacttcttgcataagagactctgttaaccctagaacggcaaatttagaagcgctataagcacttgttacagcagctcctctttggcccgctgtagacgaaatattaatgatatctccggctttgcgttcgatcatttccggaagcaccgcgcgagtcacatgatacacacccattaggttgacttgtataatattttcccattcatcggctgacagatctaagaaaccgccaaatttgctgattcccgcgttattaatgagaatatcgatatcaccaagctgttctttcacttgagcgacggcttggttaacctgctcggcatcttttacatctgcagcagcaaatgcagcttttacaccaagcgctttgacttcttctgccactttttcaacattagcggcagtccggccgattaacccaatatttacgccttctttcgcaagagcaagagctgtagcacggccgatccctctgcctccgcctgtgattagtgcagttttatgttgtaaactttgcaattgaagcaccctttctttgtttacatatgtacgatatcacattataagtacaatacatccaatacgcaaatcaaacgaactgtgtaaatatcatttcttctgattaaaaaagcggatacagggtaatgacataagaaaaggagtgaacatatgattatagtttatatcagtcttgtagtattagcagtttctattatcttcttaggagttaccgtgattcaaaacaagaaaaaaatggaccctgcactaaaggagctttcctctgttacgcaggctatgcaaaaacaaatcgaaggattaaaaacagaaacagagctgctgacgcaaaaacaaaagaagattcagcaggatgtccaaataaaaaaatacacgtttcagcagaccgcagctgaagtgaaagaagttccccaagcagtcaaagaggtgtggcaggcaggacattttaatagcagataaggatgaatgagatcccgttgttacgatcagaatggacaaatgggatctcatttttcgaggaggcttacacatgattataaaccgcagctgcttaaaagagttcgcagaaaaagtacattttcttccctcttcacttacaaagtccgatttacttactgatccatttcgtctccatcaagaaaacgaacttggcatctactattcacctcataatgaatttatcaatcgggatgcctcgcttgtgattgccgggatcacgcctggtttttcccagatgaagacagcgtacgaaacagccgccgaaagcctgcggcaaggcgggactcttgagcaaatggcagtagacacaaaaatagcagcgggtttctccggatcgatgagacataaccttattaccatgctggatttatgcgggctgccgcaagcttttggcattcaaagcgccgcaaagctttttggagaattacggcatatgctccatacaacttccgttattaaatatcctgtctttatccagcaaaaaaactataccggatacaaaccggctatcactcattctcctatcctaagcacttatgcttttgggcacttccctgcagagcttaaccatgtgacgggaccagctcttctcattccgttaggaaaagcggccgaaacagtgtgtgaaacattgatcagacagcacagcctccagaatttgatttgccttaacggctttccccatccatcaggcgcgaacggccatcgtttgaaacaattcagcaaaaacaaagagcaactagaaagacaaattcgttcctttgctgcattggttgatttcgctatagaaaagaggaaataaaagggatatgataaacaaaaacacaaacgtggggagtggttgaatgtttcctatattagaaacggatcggcttatacttaggcaaatcacagatcaggatgcggaagccatttttgcttgtttctcaaacgatgaggtgacacgctattatgggcttgaaaacatggaatctatagaacaggccatttcaatgattcaaacgtttgctgccctctatcaagaaaaacgcggtatacggtggggaattgaaagacgggacactaaagaactgatcggaacaattggctttcacgctctggcccaaaagcataggcgcgcggaaatcggttatgaaatcatcccggagcattggcgaaacggatttgcatcagaagtcatttcaaaggtcgtatcttacggattttctgcccttggactgacgcgtattggcgcagttgtatttaccgctaatgaagcatcaaatcggctgcttctaaaaatgggttttcaaaaagaaggcgttttaagacagtacatgtatcaaaatggaattccaaacgatacaaatgtatattctattttaaaatcaagcaaatgaacggacgacattctctcaatctgtatgcacactcccttcctcttcttggtgactgcccaaaatagaaggggcagccagcctctgcaccgactccagtatgggacagtaaatgctaaatagcctgatagaacacatcacaaaatatagtgaagaggcttattctttttcttgccccgcatgaatgatctgtgatgtaccaatggtttggccagaagaattcaatgctttcacctgaaaatatggcccaatcgaatgaacaagaatatctgtttcaaatccggttcggggagcatccgttcccacctcagacaatttgttaggtgctgtaccagctaacactttccaggctacagtttcagttgaaccgttccatgatgcataaacaatggctgcatcttcacataatggatttacagcaatactgggtggataaaacggcaagcctacccatttatccttaaacgccctataagaaagattttgaccaggaaactgcatatcatataacaaattcaacgaaggatcttttttattattaccagcactcctatattcagaaagatacggttcctgtccccatccaacgaattgatttccatttgatagtttctgaacatttccttgacttggaacatacagcgctggatcatgataataagttcgatctgcttttgcagtcatgttatggaaatcaagttgaaggattaaaccacgagcctctccctcaggcggagagcttgaagaagcac

(The sequence listing continues in the following parts.)